United States Patent Application Publication US 2025/0222082 A1 - sequence listing, part 8

SEQ ID NO: 74630 - DNA, 1320 bp, synthetic construct; identical to SEQ ID NO: 72802
  source 1..1320: mol_type = other DNA

SEQ ID NO: 74631 - DNA, 945 bp, synthetic construct; identical to SEQ ID NO: 72803
  source 1..945: mol_type = other DNA

SEQ ID NO: 74632 - DNA, 1023 bp, synthetic construct; identical to SEQ ID NO: 72806
  source 1..1023: mol_type = other DNA

SEQ ID NO: 74633 - DNA, 726 bp, synthetic construct; identical to SEQ ID NO: 72808
  source 1..726: mol_type = other DNA

SEQ ID NO: 74634 - DNA, 1479 bp, synthetic construct; identical to SEQ ID NO: 72810
  source 1..1479: mol_type = other DNA

SEQ ID NO: 74635 - DNA, 999 bp, synthetic construct; identical to SEQ ID NO: 72811
  source 1..999: mol_type = other DNA

SEQ ID NO: 74636 - DNA, 447 bp, synthetic construct; identical to SEQ ID NO: 72812
  source 1..447: mol_type = other DNA

SEQ ID NO: 74637 - DNA, 492 bp, synthetic construct; identical to SEQ ID NO: 72813
  source 1..492: mol_type = other DNA

SEQ ID NO: 74638 - DNA, 252 bp, synthetic construct; identical to SEQ ID NO: 72814
  source 1..252: mol_type = other DNA

SEQ ID NO: 74639 - DNA, 282 bp, synthetic construct; identical to SEQ ID NO: 72816
  source 1..282: mol_type = other DNA

SEQ ID NO: 74640 - DNA, 336 bp, synthetic construct; identical to SEQ ID NO: 72817
  source 1..336: mol_type = other DNA

SEQ ID NO: 74641 - DNA, 1455 bp, synthetic construct; identical to SEQ ID NO: 72818
  source 1..1455: mol_type = other DNA

SEQ ID NO: 74642 - DNA, 387 bp, synthetic construct; identical to SEQ ID NO: 72819
  source 1..387: mol_type = other DNA

SEQ ID NO: 74643 - DNA, 423 bp, synthetic construct; identical to SEQ ID NO: 72821
  source 1..423: mol_type = other DNA

SEQ ID NO: 74644 - DNA, 267 bp, synthetic construct; identical to SEQ ID NO: 72822
  source 1..267: mol_type = other DNA

SEQ ID NO: 74645 - DNA, 966 bp, synthetic construct; identical to SEQ ID NO: 72824
  source 1..966: mol_type = other DNA

SEQ ID NO: 74646 - DNA, 705 bp, synthetic construct; identical to SEQ ID NO: 72825
  source 1..705: mol_type = other DNA

SEQ ID NO: 74647 - DNA, 1134 bp, synthetic construct; identical to SEQ ID NO: 72826
  source 1..1134: mol_type = other DNA

SEQ ID NO: 74648 - DNA, 1434 bp, synthetic construct; identical to SEQ ID NO: 72828
  source 1..1434: mol_type = other DNA

SEQ ID NO: 74649 - DNA, 807 bp, synthetic construct; identical to SEQ ID NO: 72830
  source 1..807: mol_type = other DNA

SEQ ID NO: 74650 - DNA, 1425 bp, synthetic construct; identical to SEQ ID NO: 72832
  source 1..1425: mol_type = other DNA

SEQ ID NO: 74651 - DNA, 4815 bp, synthetic construct; identical to SEQ ID NO: 72836
  source 1..4815: mol_type = other DNA

SEQ ID NO: 74652 - DNA, 843 bp, synthetic construct; identical to SEQ ID NO: 72837
  source 1..843: mol_type = other DNA

SEQ ID NO: 74653 - DNA, 531 bp, synthetic construct; identical to SEQ ID NO: 72838
  source 1..531: mol_type = other DNA

SEQ ID NO: 74654 - DNA, 411 bp, synthetic construct; identical to SEQ ID NO: 72839
  source 1..411: mol_type = other DNA

SEQ ID NO: 74655 - DNA, 570 bp, synthetic construct; identical to SEQ ID NO: 72840
  source 1..570: mol_type = other DNA

SEQ ID NO: 74656 - DNA, 1215 bp, synthetic construct; identical to SEQ ID NO: 72841
  source 1..1215: mol_type = other DNA

SEQ ID NO: 74657 - DNA, 402 bp, synthetic construct; identical to SEQ ID NO: 72843
  source 1..402: mol_type = other DNA

SEQ ID NO: 74658 - DNA, 777 bp, synthetic construct; identical to SEQ ID NO: 72844
  source 1..777: mol_type = other DNA

SEQ ID NO: 74659 - DNA, 2493 bp, synthetic construct; identical to SEQ ID NO: 72845
  source 1..2493: mol_type = other DNA

SEQ ID NO: 74660 - DNA, 438 bp, synthetic construct; identical to SEQ ID NO: 72846
  source 1..438: mol_type = other DNA

SEQ ID NO: 74661 - DNA, 486 bp, synthetic construct; identical to SEQ ID NO: 72848
  source 1..486: mol_type = other DNA

SEQ ID NO: 74662 - DNA, 906 bp, synthetic construct; identical to SEQ ID NO: 72849
  source 1..906: mol_type = other DNA

SEQ ID NO: 74663 - DNA, 408 bp, synthetic construct; identical to SEQ ID NO: 72850
  source 1..408: mol_type = other DNA

SEQ ID NO: 74664 - DNA, 216 bp, synthetic construct; identical to SEQ ID NO: 72851
  source 1..216: mol_type = other DNA

SEQ ID NO: 74665 - DNA, 2121 bp, synthetic construct; identical to SEQ ID NO: 72852
  source 1..2121: mol_type = other DNA

SEQ ID NO: 74666 - DNA, 852 bp, synthetic construct; identical to SEQ ID NO: 72853
  source 1..852: mol_type = other DNA

SEQ ID NO: 74667 - DNA, 330 bp, synthetic construct; identical to SEQ ID NO: 72855
  source 1..330: mol_type = other DNA

SEQ ID NO: 74668 - DNA, 957 bp, synthetic construct; identical to SEQ ID NO: 72856
  source 1..957: mol_type = other DNA

SEQ ID NO: 74669 - DNA, 585 bp, synthetic construct; identical to SEQ ID NO: 72861
  source 1..585: mol_type = other DNA

SEQ ID NO: 74670 - DNA, 339 bp, synthetic construct; identical to SEQ ID NO: 72862
  source 1..339: mol_type = other DNA

SEQ ID NO: 74671 - DNA, 684 bp, synthetic construct; identical to SEQ ID NO: 72864
  source 1..684: mol_type = other DNA

SEQ ID NO: 74672 - DNA, 516 bp, synthetic construct; identical to SEQ ID NO: 72865
  source 1..516: mol_type = other DNA

SEQ ID NO: 74673 - DNA, 2931 bp, synthetic construct; identical to SEQ ID NO: 72866
  source 1..2931: mol_type = other DNA

SEQ ID NO: 74674 - DNA, 624 bp, synthetic construct; identical to SEQ ID NO: 72867
  source 1..624: mol_type = other DNA

SEQ ID NO: 74675 - DNA, 483 bp, synthetic construct; identical to SEQ ID NO: 72868
  source 1..483: mol_type = other DNA

SEQ ID NO: 74676 - DNA, 1062 bp, synthetic construct; identical to SEQ ID NO: 72869
  source 1..1062: mol_type = other DNA

SEQ ID NO: 74677 - DNA, 903 bp, synthetic construct; identical to SEQ ID NO: 72870
  source 1..903: mol_type = other DNA

SEQ ID NO: 74678 - DNA, 333 bp, synthetic construct; identical to SEQ ID NO: 72871
  source 1..333: mol_type = other DNA

SEQ ID NO: 74679 - DNA, 834 bp, synthetic construct; identical to SEQ ID NO: 72872
  source 1..834: mol_type = other DNA

SEQ ID NO: 74680 - DNA, 1365 bp, synthetic construct; identical to SEQ ID NO: 72873
  source 1..1365: mol_type = other DNA

SEQ ID NO: 74681 - DNA, 426 bp, synthetic construct; identical to SEQ ID NO: 72874
  source 1..426: mol_type = other DNA

SEQ ID NO: 74682 - DNA, 1113 bp, synthetic construct; identical to SEQ ID NO: 72875
  source 1..1113: mol_type = other DNA

SEQ ID NO: 74683 - DNA, 1206 bp, synthetic construct; identical to SEQ ID NO: 72878
  source 1..1206: mol_type = other DNA

SEQ ID NO: 74684 - DNA, 408 bp, synthetic construct; identical to SEQ ID NO: 72881
  source 1..408: mol_type = other DNA

SEQ ID NO: 74685 - DNA, 1644 bp, synthetic construct; identical to SEQ ID NO: 72883
  source 1..1644: mol_type = other DNA

SEQ ID NO: 74686 - DNA, 1305 bp, synthetic construct; identical to SEQ ID NO: 72884
  source 1..1305: mol_type = other DNA

SEQ ID NO: 74687 - DNA, 1035 bp, synthetic construct; identical to SEQ ID NO: 72886
  source 1..1035: mol_type = other DNA

SEQ ID NO: 74688 - DNA, 1272 bp, synthetic construct; identical to SEQ ID NO: 72890
  source 1..1272: mol_type = other DNA

SEQ ID NO: 74689 - DNA, 867 bp, synthetic construct; identical to SEQ ID NO: 72891
  source 1..867: mol_type = other DNA

SEQ ID NO: 74690 - DNA, 939 bp, synthetic construct; identical to SEQ ID NO: 72892
  source 1..939: mol_type = other DNA

SEQ ID NO: 74691 - DNA, 1698 bp, synthetic construct; identical to SEQ ID NO: 72894
  source 1..1698: mol_type = other DNA

SEQ ID NO: 74692 - DNA, 102 bp, synthetic construct; identical to SEQ ID NO: 72895
  source 1..102: mol_type = other DNA

SEQ ID NO: 74693 - DNA, 1245 bp, synthetic construct; identical to SEQ ID NO: 72896
  source 1..1245: mol_type = other DNA

SEQ ID NO: 74694 - DNA, 318 bp, synthetic construct; identical to SEQ ID NO: 72900
  source 1..318: mol_type = other DNA

SEQ ID NO: 74695 - DNA, 279 bp, synthetic construct; identical to SEQ ID NO: 72901
  source 1..279: mol_type = other DNA

SEQ ID NO: 74696 - DNA, 1080 bp, synthetic construct; identical to SEQ ID NO: 72902
  source 1..1080: mol_type = other DNA

SEQ ID NO: 74697 - DNA, 960 bp, synthetic construct; identical to SEQ ID NO: 72904
  source 1..960: mol_type = other DNA

SEQ ID NO: 74698 - DNA, 858 bp, synthetic construct; identical to SEQ ID NO: 72905
  source 1..858: mol_type = other DNA

SEQ ID NO: 74699 - DNA, 1404 bp, synthetic construct; identical to SEQ ID NO: 72906
  source 1..1404: mol_type = other DNA

SEQ ID NO: 74700 - DNA, 1131 bp, synthetic construct; identical to SEQ ID NO: 72908
  source 1..1131: mol_type = other DNA

SEQ ID NO: 74701 - DNA, 705 bp, synthetic construct; identical to SEQ ID NO: 72909
  source 1..705: mol_type = other DNA

SEQ ID NO: 74702 - DNA, 963 bp, synthetic construct; identical to SEQ ID NO: 72910
  source 1..963: mol_type = other DNA

SEQ ID NO: 74703 - DNA, 312 bp, synthetic construct; identical to SEQ ID NO: 72911
  source 1..312: mol_type = other DNA

SEQ ID NO: 74704 - DNA, 1377 bp, synthetic construct; identical to SEQ ID NO: 72914
  source 1..1377: mol_type = other DNA

SEQ ID NO: 74705 - DNA, 804 bp, synthetic construct; identical to SEQ ID NO: 72915
  source 1..804: mol_type = other DNA

SEQ ID NO: 74706 - DNA, 1098 bp, synthetic construct; identical to SEQ ID NO: 72916
  source 1..1098: mol_type = other DNA

SEQ ID NO: 74707 - DNA, 231 bp, synthetic construct; identical to SEQ ID NO: 72917
  source 1..231: mol_type = other DNA

SEQ ID NO: 74708 - DNA, 570 bp, synthetic construct; identical to SEQ ID NO: 72918
  source 1..570: mol_type = other DNA

SEQ ID NO: 74709 - DNA, 1683 bp, synthetic construct; identical to SEQ ID NO: 72919
  source 1..1683: mol_type = other DNA

SEQ ID NO: 74710 - DNA, 2679 bp, synthetic construct; identical to SEQ ID NO: 72921
  source 1..2679: mol_type = other DNA

SEQ ID NO: 74711 - DNA, 447 bp, synthetic construct; identical to SEQ ID NO: 72922
  source 1..447: mol_type = other DNA

SEQ ID NO: 74712 - DNA, 942 bp, synthetic construct; identical to SEQ ID NO: 72925
  source 1..942: mol_type = other DNA

SEQ ID NO: 74713 - DNA, 675 bp, synthetic construct; identical to SEQ ID NO: 72926
  source 1..675: mol_type = other DNA

SEQ ID NO: 74714 - DNA, 5712 bp, synthetic construct; identical to SEQ ID NO: 72928
  source 1..5712: mol_type = other DNA

SEQ ID NO: 74715 - DNA, 492 bp, synthetic construct; identical to SEQ ID NO: 72930
  source 1..492: mol_type = other DNA

SEQ ID NO: 74716 - DNA, 1455 bp, synthetic construct; identical to SEQ ID NO: 72934
  source 1..1455: mol_type = other DNA

SEQ ID NO: 74717 - DNA, 732 bp, synthetic construct; identical to SEQ ID NO: 72936
  source 1..732: mol_type = other DNA

SEQ ID NO: 74718 - DNA, 627 bp, synthetic construct; identical to SEQ ID NO: 72938
  source 1..627: mol_type = other DNA

SEQ ID NO: 74719 - DNA, 558 bp, synthetic construct; identical to SEQ ID NO: 72940
  source 1..558: mol_type = other DNA

SEQ ID NO: 74720 - DNA, 675 bp, synthetic construct; identical to SEQ ID NO: 72941
  source 1..675: mol_type = other DNA

SEQ ID NO: 74721 - DNA, 651 bp, synthetic construct; identical to SEQ ID NO: 72942
  source 1..651: mol_type = other DNA

SEQ ID NO: 74722 - DNA, 180 bp, synthetic construct; identical to SEQ ID NO: 72943
  source 1..180: mol_type = other DNA

SEQ ID NO: 74723 - DNA, 321 bp, synthetic construct; identical to SEQ ID NO: 72944
  source 1..321: mol_type = other DNA

SEQ ID NO: 74724 - DNA, 696 bp, synthetic construct; identical to SEQ ID NO: 72946
  source 1..696: mol_type = other DNA

SEQ ID NO: 74725 - DNA, 399 bp, synthetic construct; identical to SEQ ID NO: 72947
  source 1..399: mol_type = other DNA

SEQ ID NO: 74726 - DNA, 4473 bp, synthetic construct; identical to SEQ ID NO: 72948
  source 1..4473: mol_type = other DNA

SEQ ID NO: 74727 - DNA, 324 bp, synthetic construct; identical to SEQ ID NO: 72949
  source 1..324: mol_type = other DNA

SEQ ID NO: 74728 - DNA, 333 bp, synthetic construct; identical to SEQ ID NO: 72950
  source 1..333: mol_type = other DNA

SEQ ID NO: 74729 - DNA, 963 bp, synthetic construct; identical to SEQ ID NO: 72951
  source 1..963: mol_type = other DNA

SEQ ID NO: 74730 - DNA, 909 bp, synthetic construct; identical to SEQ ID NO: 72952
  source 1..909: mol_type = other DNA

SEQ ID NO: 74731 - DNA, 1887 bp, synthetic construct; identical to SEQ ID NO: 72953
  source 1..1887: mol_type = other DNA

SEQ ID NO: 74732 - DNA, 3057 bp, synthetic construct; identical to SEQ ID NO: 72956
  source 1..3057: mol_type = other DNA

SEQ ID NO: 74733 - DNA, 570 bp, synthetic construct; identical to SEQ ID NO: 72959
  source 1..570: mol_type = other DNA

SEQ ID NO: 74734 - DNA, 1779 bp, synthetic construct; identical to SEQ ID NO: 72960
  source 1..1779: mol_type = other DNA

SEQ ID NO: 74735 - DNA, 729 bp, synthetic construct; identical to SEQ ID NO: 72963
  source 1..729: mol_type = other DNA

SEQ ID NO: 74736 - DNA, 1254 bp, synthetic construct; identical to SEQ ID NO: 72966
  source 1..1254: mol_type = other DNA

SEQ ID NO: 74737 - DNA, 2019 bp, synthetic construct; identical to SEQ ID NO: 72968
  source 1..2019: mol_type = other DNA

SEQ ID NO: 74738 - DNA, 843 bp, synthetic construct; identical to SEQ ID NO: 72969
  source 1..843: mol_type = other DNA

SEQ ID NO: 74739 - DNA, 831 bp, synthetic construct; identical to SEQ ID NO: 72970
  source 1..831: mol_type = other DNA

SEQ ID NO: 74740 - DNA, 639 bp, synthetic construct; identical to SEQ ID NO: 72972
  source 1..639: mol_type = other DNA

SEQ ID NO: 74741 - DNA, 1275 bp, synthetic construct; identical to SEQ ID NO: 72973
  source 1..1275: mol_type = other DNA

SEQ ID NO: 74742 - DNA, 774 bp, synthetic construct; identical to SEQ ID NO: 72974
  source 1..774: mol_type = other DNA

SEQ ID NO: 74743 - DNA, 900 bp, synthetic construct; identical to SEQ ID NO: 72975
  source 1..900: mol_type = other DNA

SEQ ID NO: 74744 - DNA, 501 bp, synthetic construct; identical to SEQ ID NO: 72976
  source 1..501: mol_type = other DNA

SEQ ID NO: 74745 - DNA, 483 bp, synthetic construct; identical to SEQ ID NO: 72979
  source 1..483: mol_type = other DNA

SEQ ID NO: 74746 - DNA, 192 bp, synthetic construct; identical to SEQ ID NO: 72981
  source 1..192: mol_type = other DNA

SEQ ID NO: 74747 - DNA, 915 bp, synthetic construct; identical to SEQ ID NO: 72982
  source 1..915: mol_type = other DNA

SEQ ID NO: 74748 - DNA, 1476 bp, synthetic construct; identical to SEQ ID NO: 72983
  source 1..1476: mol_type = other DNA

SEQ ID NO: 74749 - DNA, 1611 bp, synthetic construct; identical to SEQ ID NO: 72987
  source 1..1611: mol_type = other DNA

SEQ ID NO: 74750 - DNA, 114 bp, synthetic construct; identical to SEQ ID NO: 72988
  source 1..114: mol_type = other DNA

SEQ ID NO: 74751 - DNA, 2061 bp, synthetic construct; identical to SEQ ID NO: 72993
  source 1..2061: mol_type = other DNA

SEQ ID NO: 74752 - DNA, 1458 bp, synthetic construct; identical to SEQ ID NO: 72994
  source 1..1458: mol_type = other DNA

SEQ ID NO: 74753 - DNA, 2865 bp, synthetic construct; identical to SEQ ID NO: 72995
  source 1..2865: mol_type = other DNA

SEQ ID NO: 74754 - DNA, 4419 bp, synthetic construct; identical to SEQ ID NO: 72996
  source 1..4419: mol_type = other DNA

SEQ ID NO: 74755 - DNA, 1353 bp, synthetic construct; identical to SEQ ID NO: 72998
  source 1..1353: mol_type = other DNA

SEQ ID NO: 74756 - DNA, 378 bp, synthetic construct; identical to SEQ ID NO: 72999
  source 1..378: mol_type = other DNA

SEQ ID NO: 74757 - DNA, 804 bp, synthetic construct; identical to SEQ ID NO: 73000
  source 1..804: mol_type = other DNA

SEQ ID NO: 74758 - DNA, 1365 bp, synthetic construct; identical to SEQ ID NO: 73002
  source 1..1365: mol_type = other DNA

SEQ ID NO: 74759 - DNA, 1836 bp, synthetic construct; identical to SEQ ID NO: 73003
  source 1..1836: mol_type = other DNA

SEQ ID NO: 74760 - DNA, 591 bp, synthetic construct; identical to SEQ ID NO: 73004
  source 1..591: mol_type = other DNA

SEQ ID NO: 74761 - DNA, 678 bp, synthetic construct; identical to SEQ ID NO: 73005
  source 1..678: mol_type = other DNA

SEQ ID NO: 74762 - DNA, 1071 bp, synthetic construct; identical to SEQ ID NO: 73007
  source 1..1071: mol_type = other DNA

SEQ ID NO: 74763 - DNA, 1260 bp, synthetic construct; identical to SEQ ID NO: 73010
  source 1..1260: mol_type = other DNA

SEQ ID NO: 74764 - DNA, 960 bp, synthetic construct; identical to SEQ ID NO: 73011
  source 1..960: mol_type = other DNA

SEQ ID NO: 74765 - DNA, 4248 bp, synthetic construct; identical to SEQ ID NO: 73017
  source 1..4248: mol_type = other DNA

SEQ ID NO: 74766 - DNA, 1149 bp, synthetic construct; identical to SEQ ID NO: 73018
  source 1..1149: mol_type = other DNA

SEQ ID NO: 74767 - DNA, 684 bp, synthetic construct; identical to SEQ ID NO: 73019
  source 1..684: mol_type = other DNA

SEQ ID NO: 74768 - DNA, 192 bp, synthetic construct; identical to SEQ ID NO: 73020
  source 1..192: mol_type = other DNA

SEQ ID NO: 74769 - DNA, 849 bp, synthetic construct; identical to SEQ ID NO: 73021
  source 1..849: mol_type = other DNA

SEQ ID NO: 74770 - DNA, 204 bp, synthetic construct; identical to SEQ ID NO: 73022
  source 1..204: mol_type = other DNA

SEQ ID NO: 74771 - DNA, 1059 bp, synthetic construct; identical to SEQ ID NO: 73024
  source 1..1059: mol_type = other DNA

SEQ ID NO: 74772 - DNA, 888 bp, synthetic construct; identical to SEQ ID NO: 73026
  source 1..888: mol_type = other DNA

SEQ ID NO: 74773 - DNA, 1455 bp, synthetic construct; identical to SEQ ID NO: 73027
  source 1..1455: mol_type = other DNA

SEQ ID NO: 74774 - DNA, 810 bp, synthetic construct; identical to SEQ ID NO: 73030
  source 1..810: mol_type = other DNA

SEQ ID NO: 74775 - DNA, 225 bp, synthetic construct; identical to SEQ ID NO: 73031
  source 1..225: mol_type = other DNA

SEQ ID NO: 74776 - DNA, 234 bp, synthetic construct; identical to SEQ ID NO: 73034
  source 1..234: mol_type = other DNA

SEQ ID NO: 74777 - DNA, 351 bp, synthetic construct; identical to SEQ ID NO: 73039
  source 1..351: mol_type = other DNA

SEQ ID NO: 74778 - DNA, 339 bp, synthetic construct; identical to SEQ ID NO: 73041
  source 1..339: mol_type = other DNA

SEQ ID NO: 74779 - DNA, 510 bp, synthetic construct; identical to SEQ ID NO: 73042
  source 1..510: mol_type = other DNA

SEQ ID NO: 74780 - DNA, 489 bp, synthetic construct; identical to SEQ ID NO: 73043
  source 1..489: mol_type = other DNA

SEQ ID NO: 74781 - DNA, 897 bp, synthetic construct; identical to SEQ ID NO: 73044
  source 1..897: mol_type = other DNA

SEQ ID NO: 74782 - DNA, 681 bp, synthetic construct; identical to SEQ ID NO: 73046
  source 1..681: mol_type = other DNA

SEQ ID NO: 74783 - DNA, 582 bp, synthetic construct; identical to SEQ ID NO: 73048
  source 1..582: mol_type = other DNA

SEQ ID NO: 74784 - DNA, 573 bp, synthetic construct; identical to SEQ ID NO: 73049
  source 1..573: mol_type = other DNA

SEQ ID NO: 74785 - DNA, 948 bp, synthetic construct; identical to SEQ ID NO: 73050
  source 1..948: mol_type = other DNA

SEQ ID NO: 74786 - DNA, 183 bp, synthetic construct; identical to SEQ ID NO: 73051
  source 1..183: mol_type = other DNA

SEQ ID NO: 74787 - DNA, 642 bp, synthetic construct; identical to SEQ ID NO: 73053
  source 1..642: mol_type = other DNA

SEQ ID NO: 74788 - DNA, 693 bp, synthetic construct; identical to SEQ ID NO: 73056
  source 1..693: mol_type = other DNA

SEQ ID NO: 74789 - DNA, 369 bp, synthetic construct; identical to SEQ ID NO: 73057
  source 1..369: mol_type = other DNA

SEQ ID NO: 74790 - DNA, 408 bp, synthetic construct; identical to SEQ ID NO: 73058
  source 1..408: mol_type = other DNA

SEQ ID NO: 74791 - DNA, 420 bp, synthetic construct; identical to SEQ ID NO: 73059
  source 1..420: mol_type = other DNA

SEQ ID NO: 74792 - DNA, 147 bp, synthetic construct; identical to SEQ ID NO: 73062
  source 1..147: mol_type = other DNA

SEQ ID NO: 74793 - DNA, 432 bp, synthetic construct; identical to SEQ ID NO: 73063
  source 1..432: mol_type = other DNA

SEQ ID NO: 74794 - DNA, 750 bp, synthetic construct; identical to SEQ ID NO: 73064
  source 1..750: mol_type = other DNA

SEQ ID NO: 74795 - DNA, 753 bp, synthetic construct; identical to SEQ ID NO: 73065
  source 1..753: mol_type = other DNA

SEQ ID NO: 74796 - DNA, 498 bp, synthetic construct; identical to SEQ ID NO: 73067
  source 1..498: mol_type = other DNA

SEQ ID NO: 74797 - DNA, 249 bp, synthetic construct; identical to SEQ ID NO: 73068
  source 1..249: mol_type = other DNA

SEQ ID NO: 74798 - DNA, 261 bp, synthetic construct; identical to SEQ ID NO: 73070
  source 1..261: mol_type = other DNA

SEQ ID NO: 74799 - DNA, 594 bp, synthetic construct; identical to SEQ ID NO: 73071
  source 1..594: mol_type = other DNA

SEQ ID NO: 74800 - DNA, 696 bp, synthetic construct; identical to SEQ ID NO: 73072
  source 1..696: mol_type = other DNA

SEQ ID NO: 74801 - DNA, 672 bp, synthetic construct; identical to SEQ ID NO: 73073
  source 1..672: mol_type = other DNA

SEQ ID NO: 74802 - DNA, 231 bp, synthetic construct; identical to SEQ ID NO: 73074
  source 1..231: mol_type = other DNA

SEQ ID NO: 74803 - DNA, 873 bp, synthetic construct; identical to SEQ ID NO: 73075
  source 1..873: mol_type = other DNA

SEQ ID NO: 74804 - DNA, 255 bp, synthetic construct; identical to SEQ ID NO: 73076
  source 1..255: mol_type = other DNA

SEQ ID NO: 74805 - DNA, 306 bp, synthetic construct; identical to SEQ ID NO: 73077
  source 1..306: mol_type = other DNA

SEQ ID NO: 74806 - DNA, 450 bp, synthetic construct; identical to SEQ ID NO: 73078
  source 1..450: mol_type = other DNA

SEQ ID NO: 74807 - DNA, 636 bp, synthetic construct; identical to SEQ ID NO: 73079
  source 1..636: mol_type = other DNA

SEQ ID NO: 74808 - DNA, 366 bp, synthetic construct; identical to SEQ ID NO: 73081
  source 1..366: mol_type = other DNA

SEQ ID NO: 74809 - DNA, 993 bp, synthetic construct; identical to SEQ ID NO: 73084
  source 1..993: mol_type = other DNA

SEQ ID NO: 74810 - DNA, 993 bp, synthetic construct; identical to SEQ ID NO: 73085
  source 1..993: mol_type = other DNA

SEQ ID NO: 74811 - DNA, 990 bp, synthetic construct; identical to SEQ ID NO: 73086
  source 1..990: mol_type = other DNA

SEQ ID NO: 74812 - DNA, 993 bp, synthetic construct; identical to SEQ ID NO: 73087
  source 1..993: mol_type = other DNA

SEQ ID NO: 74813 - DNA, 960 bp, synthetic construct; identical to SEQ ID NO: 73088
  source 1..960: mol_type = other DNA

SEQ ID NO: 74814 - DNA, 222 bp, synthetic construct; identical to SEQ ID NO: 73090
  source 1..222: mol_type = other DNA

SEQ ID NO: 74815 - DNA, 699 bp, synthetic construct; identical to SEQ ID NO: 73091
  source 1..699: mol_type = other DNA

SEQ ID NO: 74816 - DNA, 420 bp, synthetic construct; identical to SEQ ID NO: 73092
  source 1..420: mol_type = other DNA

SEQ ID NO: 74817 - DNA, 651 bp, synthetic construct; identical to SEQ ID NO: 73094
  source 1..651: mol_type = other DNA

SEQ ID NO: 74818 - DNA, 300 bp, synthetic construct; identical to SEQ ID NO: 73096
  source 1..300: mol_type = other DNA

SEQ ID NO: 74819 - DNA, 378 bp, synthetic construct; identical to SEQ ID NO: 73097
  source 1..378: mol_type = other DNA

SEQ ID NO: 74820 - DNA, 933 bp, synthetic construct; identical to SEQ ID NO: 73099
  source 1..933: mol_type = other DNA

SEQ ID NO: 74821 - DNA, 2130 bp, synthetic construct; identical to SEQ ID NO: 73100
  source 1..2130: mol_type = other DNA

SEQ ID NO: 74822 - DNA, 222 bp, synthetic construct; identical to SEQ ID NO: 73105
  source 1..222: mol_type = other DNA

SEQ ID NO: 74823 - DNA, 2985 bp, synthetic construct; identical to SEQ ID NO: 73106
  source 1..2985: mol_type = other DNA

SEQ ID NO: 74824 - DNA, 1716 bp, synthetic construct; identical to SEQ ID NO: 73107
  source 1..1716: mol_type = other DNA

SEQ ID NO: 74825 - DNA, 357 bp, synthetic construct; identical to SEQ ID NO: 73109
  source 1..357: mol_type = other DNA

SEQ ID NO: 74826 - DNA, 630 bp, synthetic construct; identical to SEQ ID NO: 73110
  source 1..630: mol_type = other DNA

SEQ ID NO: 74827 - DNA, 519 bp, synthetic construct; identical to SEQ ID NO: 73114
  source 1..519: mol_type = other DNA

SEQ ID NO: 74828 - DNA, 612 bp, synthetic construct; identical to SEQ ID NO: 73115
  source 1..612: mol_type = other DNA

SEQ ID NO: 74829 - DNA, 357 bp, synthetic construct; identical to SEQ ID NO: 73116
  source 1..357: mol_type = other DNA

SEQ ID NO: 74830 - DNA, 762 bp, synthetic construct; identical to SEQ ID NO: 73117
  source 1..762: mol_type = other DNA

SEQ ID NO: 74831 - DNA, 612 bp, synthetic construct; identical to SEQ ID NO: 73122
  source 1..612: mol_type = other DNA

SEQ ID NO: 74832 - DNA, 639 bp, synthetic construct; identical to SEQ ID NO: 73124
  source 1..639: mol_type = other DNA

SEQ ID NO: 74833 - DNA, 3939 bp, synthetic construct; identical to SEQ ID NO: 73125
  source 1..3939: mol_type = other DNA

SEQ ID NO: 74834 - DNA, 177 bp, synthetic construct; identical to SEQ ID NO: 73126
  source 1..177: mol_type = other DNA

SEQ ID NO: 74835 - DNA, 315 bp, synthetic construct; identical to SEQ ID NO: 73127
  source 1..315: mol_type = other DNA

SEQ ID NO: 74836 - DNA, 2049 bp, synthetic construct; identical to SEQ ID NO: 73128
  source 1..2049: mol_type = other DNA

SEQ ID NO: 74837 - DNA, 5595 bp, synthetic construct; identical to SEQ ID NO: 73130
  source 1..5595: mol_type = other DNA

SEQ ID NO: 74838 - DNA, 5112 bp, synthetic construct; identical to SEQ ID NO: 73133
  source 1..5112: mol_type = other DNA

SEQ ID NO: 74839 - DNA, 708 bp, synthetic construct; identical to SEQ ID NO: 73134
  source 1..708: mol_type = other DNA

SEQ ID NO: 74840 - DNA, 336 bp, synthetic construct; identical to SEQ ID NO: 73136
  source 1..336: mol_type = other DNA

SEQ ID NO: 74841 - DNA, 2541 bp, synthetic construct; identical to SEQ ID NO: 73137
  source 1..2541: mol_type = other DNA

SEQ ID NO: 74842 - DNA, 1806 bp, synthetic construct; identical to SEQ ID NO: 73138
  source 1..1806: mol_type = other DNA

SEQ ID NO: 74843 - DNA, 1707 bp, synthetic construct; identical to SEQ ID NO: 73139
  source 1..1707: mol_type = other DNA

SEQ ID NO: 74844 - DNA, 372 bp, synthetic construct; identical to SEQ ID NO: 73142
  source 1..372: mol_type = other DNA

SEQ ID NO: 74845 - DNA, 5568 bp, synthetic construct; identical to SEQ ID NO: 73144
  source 1..5568: mol_type = other DNA

SEQ ID NO: 74846 - DNA, 2589 bp, synthetic construct; identical to SEQ ID NO: 73145
  source 1..2589: mol_type = other DNA

SEQ ID NO: 74847 - DNA, 486 bp, synthetic construct; identical to SEQ ID NO: 73147
  source 1..486: mol_type = other DNA

SEQ ID NO: 74848 - DNA, 993 bp, synthetic construct; identical to SEQ ID NO: 73149
  source 1..993: mol_type = other DNA

SEQ ID NO: 74849 - DNA, 711 bp, synthetic construct; identical to SEQ ID NO: 73150
  source 1..711: mol_type = other DNA

SEQ ID NO: 74850 - DNA, 324 bp, synthetic construct; identical to SEQ ID NO: 73152
  source 1..324: mol_type = other DNA

SEQ ID NO: 74851 - DNA, 816 bp, synthetic construct; identical to SEQ ID NO: 73153
  source 1..816: mol_type = other DNA

SEQ ID NO: 74852 - DNA, 753 bp, synthetic construct; identical to SEQ ID NO: 73156
  source 1..753: mol_type = other DNA

SEQ ID NO: 74853 - DNA, 1557 bp, synthetic construct; identical to SEQ ID NO: 73158
  source 1..1557: mol_type = other DNA

SEQ ID NO: 74854 - DNA, 714 bp, synthetic construct; identical to SEQ ID NO: 73159
  source 1..714: mol_type = other DNA

SEQ ID NO: 74855 - DNA, 846 bp, synthetic construct; identical to SEQ ID NO: 73160
  source 1..846: mol_type = other DNA

SEQ ID NO: 74856 - DNA, 3657 bp, synthetic construct; identical to SEQ ID NO: 73162
  source 1..3657: mol_type = other DNA

SEQ ID NO: 74857 - DNA, 3609 bp, synthetic construct; identical to SEQ ID NO: 73164
  source 1..3609: mol_type = other DNA

SEQ ID NO: 74858 - DNA, 4830 bp, synthetic construct; identical to SEQ ID NO: 73166
  source 1..4830: mol_type = other DNA

SEQ ID NO: 74859 - DNA, 507 bp, synthetic construct; identical to SEQ ID NO: 73168
  source 1..507: mol_type = other DNA

SEQ ID NO: 74860 - DNA, 1386 bp, synthetic construct; identical to SEQ ID NO: 73171
  source 1..1386: mol_type = other DNA

SEQ ID NO: 74861 - DNA, 687 bp, synthetic construct; identical to SEQ ID NO: 73172
  source 1..687: mol_type = other DNA

SEQ ID NO: 74862 - DNA, 1650 bp, synthetic construct; identical to SEQ ID NO: 73174
  source 1..1650: mol_type = other DNA

SEQ ID NO: 74863 - DNA, 576 bp, synthetic construct; identical to SEQ ID NO: 73177
  source 1..576: mol_type = other DNA

SEQ ID NO: 74864 - DNA, 357 bp, synthetic construct; identical to SEQ ID NO: 73178
  source 1..357: mol_type = other DNA

SEQ ID NO: 74865 - DNA, 222 bp, synthetic construct; identical to SEQ ID NO: 73179
  source 1..222: mol_type = other DNA

SEQ ID NO: 74866 - DNA, 1029 bp, synthetic construct; identical to SEQ ID NO: 73180
  source 1..1029: mol_type = other DNA

SEQ ID NO: 74867 - DNA, 237 bp, synthetic construct; identical to SEQ ID NO: 73182
  source 1..237: mol_type = other DNA

SEQ ID NO: 74868 - DNA, 345 bp, synthetic construct; identical to SEQ ID NO: 73183
  source 1..345: mol_type = other DNA

SEQ ID NO: 74869 - DNA, 516 bp, synthetic construct; identical to SEQ ID NO: 73184
  source 1..516: mol_type = other DNA

SEQ ID NO: 74870 - DNA, 258 bp, synthetic construct; identical to SEQ ID NO: 73187
  source 1..258: mol_type = other DNA

SEQ ID NO: 74871 - DNA, 2664 bp, synthetic construct; identical to SEQ ID NO: 73191
  source 1..2664: mol_type = other DNA

SEQ ID NO: 74872 - DNA, 549 bp, synthetic construct; identical to SEQ ID NO: 73193
  source 1..549: mol_type = other DNA

SEQ ID NO: 74873 - DNA, 354 bp, synthetic construct; identical to SEQ ID NO: 73196
  source 1..354: mol_type = other DNA

SEQ ID NO: 74874 - DNA, 252 bp, synthetic construct; identical to SEQ ID NO: 73202
  source 1..252: mol_type = other DNA

SEQ ID NO: 74875 - DNA, 270 bp, synthetic construct; identical to SEQ ID NO: 73203
  source 1..270: mol_type = other DNA

SEQ ID NO: 74876 - DNA, 384 bp, synthetic construct; identical to SEQ ID NO: 73205
  source 1..384: mol_type = other DNA

SEQ ID NO: 74877 - DNA, 570 bp, synthetic construct; identical to SEQ ID NO: 73206
  source 1..570: mol_type = other DNA

SEQ ID NO: 74878 - DNA, 1791 bp, synthetic construct; identical to SEQ ID NO: 73216
  source 1..1791: mol_type = other DNA

SEQ ID NO: 74879 - DNA, 1746 bp, synthetic construct; identical to SEQ ID NO: 73217
  source 1..1746: mol_type = other DNA

SEQ ID NO: 74880 - DNA, 582 bp, synthetic construct; identical to SEQ ID NO: 73218
  source 1..582: mol_type = other DNA

SEQ ID NO: 74881 - DNA, 1434 bp, synthetic construct; identical to SEQ ID NO: 73220
  source 1..1434: mol_type = other DNA

SEQ ID NO: 74882 - DNA, 717 bp, synthetic construct; identical to SEQ ID NO: 73224
  source 1..717: mol_type = other DNA

SEQ ID NO: 74883 - DNA, 2355 bp, synthetic construct; identical to SEQ ID NO: 73225
  source 1..2355: mol_type = other DNA

SEQ ID NO: 74884 - DNA, 1371 bp, synthetic construct; identical to SEQ ID NO: 73226
  source 1..1371: mol_type = other DNA

SEQ ID NO: 74885 - DNA, 1629 bp, synthetic construct; identical to SEQ ID NO: 73231
  source 1..1629: mol_type = other DNA

SEQ ID NO: 74886 - DNA, 1620 bp, synthetic construct; identical to SEQ ID NO: 73232
  source 1..1620: mol_type = other DNA

SEQ ID NO: 74887 - DNA, 1089 bp, synthetic construct; identical to SEQ ID NO: 73240
  source 1..1089: mol_type = other DNA

SEQ ID NO: 74888 - DNA, 1278 bp, synthetic construct; identical to SEQ ID NO: 73243
  source 1..1278: mol_type = other DNA

SEQ ID NO: 74889 - DNA, 1077 bp, synthetic construct; identical to SEQ ID NO: 73244
  source 1..1077: mol_type = other DNA

SEQ ID NO: 74890 - DNA, 1272 bp, synthetic construct; identical to SEQ ID NO: 73245
  source 1..1272: mol_type = other DNA

SEQ ID NO: 74891 - DNA, 741 bp, synthetic construct; identical to SEQ ID NO: 73246
  source 1..741: mol_type = other DNA

SEQ ID NO: 74892 - DNA, 387 bp, synthetic construct; identical to SEQ ID NO: 73252
  source 1..387: mol_type = other DNA

SEQ ID NO: 74893 - DNA, 909 bp, synthetic construct; identical to SEQ ID NO: 73253
  source 1..909: mol_type = other DNA

SEQ ID NO: 74894 - DNA, 2877 bp, synthetic construct; identical to SEQ ID NO: 73254
  source 1..2877: mol_type = other DNA

SEQ ID NO: 74895 - DNA, 183 bp, synthetic construct; identical to SEQ ID NO: 73255
  source 1..183: mol_type = other DNA

SEQ ID NO: 74896 - DNA, 207 bp, synthetic construct; identical to SEQ ID NO: 73256
  source 1..207: mol_type = other DNA

SEQ ID NO: 74897 - DNA, 1149 bp, synthetic construct; identical to SEQ ID NO: 73257
  source 1..1149: mol_type = other DNA

SEQ ID NO: 74898 - DNA, 273 bp, synthetic construct; identical to SEQ ID NO: 73259
  source 1..273: mol_type = other DNA

SEQ ID NO: 74899 - DNA, 1821 bp, synthetic construct; identical to SEQ ID NO: 73260
  source 1..1821: mol_type = other DNA

SEQ ID NO: 74900 - DNA, 279 bp, synthetic construct; identical to SEQ ID NO: 73261
  source 1..279: mol_type = other DNA

SEQ ID NO: 74901 - DNA, 579 bp, synthetic construct; identical to SEQ ID NO: 73263
  source 1..579: mol_type = other DNA

SEQ ID NO: 74902 - DNA, 1767 bp, synthetic construct; identical to SEQ ID NO: 73264
  source 1..1767: mol_type = other DNA

SEQ ID NO: 74903 - DNA, 558 bp, synthetic construct; identical to SEQ ID NO: 73265
  source 1..558: mol_type = other DNA

SEQ ID NO: 74904 - DNA, 423 bp, synthetic construct; identical to SEQ ID NO: 73266
  source 1..423: mol_type = other DNA

SEQ ID NO: 74905 - DNA, 171 bp, synthetic construct; identical to SEQ ID NO: 73267
  source 1..171: mol_type = other DNA

SEQ ID NO: 74906 - DNA, 1656 bp, synthetic construct; identical to SEQ ID NO: 73268
  source 1..1656: mol_type = other DNA

SEQ ID NO: 74907 - DNA, 1332 bp, synthetic construct; identical to SEQ ID NO: 73269
  source 1..1332: mol_type = other DNA

SEQ ID NO: 74908 - DNA, 1005 bp, synthetic construct; identical to SEQ ID NO: 73272
  source 1..1005: mol_type = other DNA

SEQ ID NO: 74909 - DNA, 1476 bp, synthetic construct; identical to SEQ ID NO: 73273
  source 1..1476: mol_type = other DNA

SEQ ID NO: 74910 - DNA, 939 bp, synthetic construct; identical to SEQ ID NO: 73275
  source 1..939: mol_type = other DNA

SEQ ID NO: 74911 - DNA, 1047 bp, synthetic construct; identical to SEQ ID NO: 73276
  source 1..1047: mol_type = other DNA

SEQ ID NO: 74912 - DNA, 2097 bp, synthetic construct; identical to SEQ ID NO: 73277
  source 1..2097: mol_type = other DNA

SEQ ID NO: 74913 - DNA, 2628 bp, synthetic construct; identical to SEQ ID NO: 73278
  source 1..2628: mol_type = other DNA

SEQ ID NO: 74914 - DNA, 480 bp, synthetic construct; identical to SEQ ID NO: 73279
  source 1..480: mol_type = other DNA

SEQ ID NO: 74915 - DNA, 1380 bp, synthetic construct; identical to SEQ ID NO: 73281
  source 1..1380: mol_type = other DNA

SEQ ID NO: 74916 - DNA, 396 bp, synthetic construct; identical to SEQ ID NO: 73282
  source 1..396: mol_type = other DNA

SEQ ID NO: 74917 - DNA, 450 bp, synthetic construct; identical to SEQ ID NO: 73283
  source 1..450: mol_type = other DNA

SEQ ID NO: 74918 - DNA, 468 bp, synthetic construct; identical to SEQ ID NO: 73285
  source 1..468: mol_type = other DNA

SEQ ID NO: 74919 - DNA, 999 bp, synthetic construct; identical to SEQ ID NO: 73288
  source 1..999: mol_type = other DNA

SEQ ID NO: 74920 - DNA, 1488 bp, synthetic construct; identical to SEQ ID NO: 73292
  source 1..1488: mol_type = other DNA

SEQ ID NO: 74921 - DNA, 369 bp, synthetic construct; identical to SEQ ID NO: 73302
  source 1..369: mol_type = other DNA

SEQ ID NO: 74922 - DNA, 774 bp, synthetic construct; identical to SEQ ID NO: 73306
  source 1..774: mol_type = other DNA

SEQ ID NO: 74923 - DNA, 849 bp, synthetic construct; identical to SEQ ID NO: 73307
  source 1..849: mol_type = other DNA

SEQ ID NO: 74924 - DNA, 2049 bp, synthetic construct; identical to SEQ ID NO: 73308
  source 1..2049: mol_type = other DNA

SEQ ID NO: 74925 - DNA, 480 bp, synthetic construct; identical to SEQ ID NO: 73309
  source 1..480: mol_type = other DNA

SEQ ID NO: 74926 - DNA, 246 bp, synthetic construct; identical to SEQ ID NO: 73310
  source 1..246: mol_type = other DNA

SEQ ID NO: 74927 - DNA, 666 bp, synthetic construct; identical to SEQ ID NO: 73311
  source 1..666: mol_type = other DNA

SEQ ID NO: 74928 - DNA, 288 bp, synthetic construct; identical to SEQ ID NO: 73312
  source 1..288: mol_type = other DNA

SEQ ID NO: 74929 - DNA, 690 bp, synthetic construct; identical to SEQ ID NO: 73313
  source 1..690: mol_type = other DNA

SEQ ID NO: 74930 - DNA, 843 bp, synthetic construct; identical to SEQ ID NO: 73314
  source 1..843: mol_type = other DNA

SEQ ID NO: 74931 - DNA, 348 bp, synthetic construct; identical to SEQ ID NO: 73315
  source 1..348: mol_type = other DNA

SEQ ID NO: 74932 - DNA, 180 bp, synthetic construct; identical to SEQ ID NO: 73317
  source 1..180: mol_type = other DNA

SEQ ID NO: 74933 - DNA, 849 bp, synthetic construct; identical to SEQ ID NO: 73318
  source 1..849: mol_type = other DNA

SEQ ID NO: 74934 - DNA, 540 bp, synthetic construct; identical to SEQ ID NO: 73319
  source 1..540: mol_type = other DNA

SEQ ID NO: 74935 - DNA, 540 bp, synthetic construct; identical to SEQ ID NO: 73323
  source 1..540: mol_type = other DNA

SEQ ID NO: 74936 - DNA, 609 bp, synthetic construct; identical to SEQ ID NO: 73326
  source 1..609: mol_type = other DNA

SEQ ID NO: 74937 - DNA, 885 bp, synthetic construct; identical to SEQ ID NO: 73329
  source 1..885: mol_type = other DNA

SEQ ID NO: 74938 - DNA, 420 bp, synthetic construct; identical to SEQ ID NO: 73332
  source 1..420: mol_type = other DNA

SEQ ID NO: 74939 - DNA, 231 bp, synthetic construct; identical to SEQ ID NO: 73333
  source 1..231: mol_type = other DNA

SEQ ID NO: 74940 - DNA, 1392 bp, synthetic construct; identical to SEQ ID NO: 73334
  source 1..1392: mol_type = other DNA

SEQ ID NO: 74941 - DNA, 315 bp, synthetic construct; identical to SEQ ID NO: 73337
  source 1..315: mol_type = other DNA

SEQ ID NO: 74942 - DNA, 732 bp, synthetic construct; identical to SEQ ID NO: 73339
  source 1..732: mol_type = other DNA

SEQ ID NO: 74943 - DNA, 825 bp, synthetic construct; identical to SEQ ID NO: 73340
  source 1..825: mol_type = other DNA

SEQ ID NO: 74944 - DNA, 633 bp, synthetic construct; identical to SEQ ID NO: 73341
  source 1..633: mol_type = other DNA

SEQ ID NO: 74945 - DNA, 636 bp, synthetic construct; identical to SEQ ID NO: 73343
  source 1..636: mol_type = other DNA

SEQ ID NO: 74946 - DNA, 1356 bp, synthetic construct; identical to SEQ ID NO: 73344
  source 1..1356: mol_type = other DNA

SEQ ID NO: 74947 - DNA, 867 bp, synthetic construct; identical to SEQ ID NO: 73348
  source 1..867: mol_type = other DNA

SEQ ID NO: 74948 - DNA, 429 bp, synthetic construct; identical to SEQ ID NO: 73349
  source 1..429: mol_type = other DNA

SEQ ID NO: 74949 - DNA, 804 bp, synthetic construct; identical to SEQ ID NO: 73350
  source 1..804: mol_type = other DNA

SEQ ID NO: 74950 - DNA, 384 bp, synthetic construct; identical to SEQ ID NO: 73351
  source 1..384: mol_type = other DNA

SEQ ID NO: 74951 - DNA, 1032 bp, synthetic construct; identical to SEQ ID NO: 73352
  source 1..1032: mol_type = other DNA

SEQ ID NO: 74952 - DNA, 711 bp, synthetic construct; identical to SEQ ID NO: 73353
  source 1..711: mol_type = other DNA

SEQ ID NO: 74953 - DNA, 675 bp, synthetic construct; identical to SEQ ID NO: 73354
  source 1..675: mol_type = other DNA

SEQ ID NO: 74954 - DNA, 1083 bp, synthetic construct; identical to SEQ ID NO: 73360
  source 1..1083: mol_type = other DNA

SEQ ID NO: 74955 - DNA, 432 bp, synthetic construct; identical to SEQ ID NO: 73361
  source 1..432: mol_type = other DNA

SEQ ID NO: 74956 - DNA, 732 bp, synthetic construct; identical to SEQ ID NO: 73362
  source 1..732: mol_type = other DNA

SEQ ID NO: 74957 - DNA, 1029 bp, synthetic construct; identical to SEQ ID NO: 73363
  source 1..1029: mol_type = other DNA

SEQ ID NO: 74958 - DNA, 396 bp, synthetic construct; identical to SEQ ID NO: 73364
  source 1..396: mol_type = other DNA

SEQ ID NO: 74959 - DNA, 498 bp, synthetic construct; identical to SEQ ID NO: 73365
  source 1..498: mol_type = other DNA

SEQ ID NO: 74960 - DNA, 570 bp, synthetic construct; identical to SEQ ID NO: 73367
  source 1..570: mol_type = other DNA

SEQ ID NO: 74961 - DNA, 630 bp, synthetic construct; identical to SEQ ID NO: 73369
  source 1..630: mol_type = other DNA

SEQ ID NO: 74962 - DNA, 2727 bp, synthetic construct; identical to SEQ ID NO: 73370
  source 1..2727: mol_type = other DNA

SEQ ID NO: 74963 - DNA, 1014 bp, synthetic construct; identical to SEQ ID NO: 73371
  source 1..1014: mol_type = other DNA

SEQ ID NO: 74964 - DNA, 789 bp, synthetic construct; identical to SEQ ID NO: 73373
  source 1..789: mol_type = other DNA

SEQ ID NO: 74965 - DNA, 1059 bp, synthetic construct; identical to SEQ ID NO: 73375
  source 1..1059: mol_type = other DNA

SEQ ID NO: 74966 - DNA, 306 bp, synthetic construct; identical to SEQ ID NO: 73378
  source 1..306: mol_type = other DNA

SEQ ID NO: 74967 - DNA, 1092 bp, synthetic construct; identical to SEQ ID NO: 73380
  source 1..1092: mol_type = other DNA

SEQ ID NO: 74968 - DNA, 387 bp, synthetic construct; identical to SEQ ID NO: 73383
  source 1..387: mol_type = other DNA

SEQ ID NO: 74969 - DNA, 1071 bp, synthetic construct; identical to SEQ ID NO: 73384
  source 1..1071: mol_type = other DNA

SEQ ID NO: 74970 - DNA, 1698 bp, synthetic construct; identical to SEQ ID NO: 73390
  source 1..1698: mol_type = other DNA

SEQ ID NO: 74971 - DNA, 855 bp, synthetic construct; identical to SEQ ID NO: 73391
  source 1..855: mol_type = other DNA

SEQ ID NO: 74972 - DNA, 1386 bp, synthetic construct; identical to SEQ ID NO: 73392
  source 1..1386: mol_type = other DNA

SEQ ID NO: 74973 - DNA, 651 bp, synthetic construct; identical to SEQ ID NO: 73393
  source 1..651: mol_type = other DNA

SEQ ID NO: 74974 - DNA, 480 bp, synthetic construct; identical to SEQ ID NO: 73394
  source 1..480: mol_type = other DNA

SEQ ID NO: 74975 - DNA, 438 bp, synthetic construct; identical to SEQ ID NO: 73397
  source 1..438: mol_type = other DNA

SEQ ID NO: 74976 - DNA, 534 bp, synthetic construct; identical to SEQ ID NO: 73399
  source 1..534: mol_type = other DNA

SEQ ID NO: 74977 - DNA, 1926 bp, synthetic construct; identical to SEQ ID NO: 73400
  source 1..1926: mol_type = other DNA

SEQ ID NO: 74978 - DNA, 1110 bp, synthetic construct; identical to SEQ ID NO: 73402
  source 1..1110: mol_type = other DNA

SEQ ID NO: 74979 - DNA, 519 bp, synthetic construct; identical to SEQ ID NO: 73403
  source 1..519: mol_type = other DNA

SEQ ID NO: 74980 - DNA, 2430 bp, synthetic construct; identical to SEQ ID NO: 73404
  source 1..2430: mol_type = other DNA

SEQ ID NO: 74981 - DNA, 933 bp, synthetic construct; identical to SEQ ID NO: 73406
  source 1..933: mol_type = other DNA

SEQ ID NO: 74982 - DNA, 783 bp, synthetic construct; identical to SEQ ID NO: 73407
  source 1..783: mol_type = other DNA

SEQ ID NO: 74983 - DNA, 999 bp, synthetic construct; identical to SEQ ID NO: 73408
  source 1..999: mol_type = other DNA

SEQ ID NO: 74984 - DNA, 216 bp, synthetic construct; identical to SEQ ID NO: 73409
  source 1..216: mol_type = other DNA

SEQ ID NO: 74985 - DNA, 846 bp, synthetic construct; identical to SEQ ID NO: 73410
  source 1..846: mol_type = other DNA

SEQ ID NO: 74986 - DNA, 1545 bp, synthetic construct; identical to SEQ ID NO: 73413
  source 1..1545: mol_type = other DNA

SEQ ID NO: 74987 - DNA, 939 bp, synthetic construct; identical to SEQ ID NO: 73414
  source 1..939: mol_type = other DNA

SEQ ID NO: 74988 - DNA, 1869 bp, synthetic construct; identical to SEQ ID NO: 73416
  source 1..1869: mol_type = other DNA

SEQ ID NO: 74989 - DNA, 1068 bp, synthetic construct; identical to SEQ ID NO: 73417
  source 1..1068: mol_type = other DNA

SEQ ID NO: 74990 - DNA, 411 bp, synthetic construct; identical to SEQ ID NO: 73421
  source 1..411: mol_type = other DNA

SEQ ID NO: 74991 - DNA, 696 bp, synthetic construct; identical to SEQ ID NO: 73423
  source 1..696: mol_type = other DNA

SEQ ID NO: 74992 - DNA, 1170 bp, synthetic construct; identical to SEQ ID NO: 73424
  source 1..1170: mol_type = other DNA

SEQ ID NO: 74993 - DNA, 720 bp, synthetic construct; identical to SEQ ID NO: 73425
  source 1..720: mol_type = other DNA

SEQ ID NO: 74994 - DNA, 1137 bp, synthetic construct; identical to SEQ ID NO: 73427
  source 1..1137: mol_type = other DNA

SEQ ID NO: 74995 - DNA, 1236 bp, synthetic construct; identical to SEQ ID NO: 73428
  source 1..1236: mol_type = other DNA

SEQ ID NO: 74996 - DNA, 933 bp, synthetic construct; identical to SEQ ID NO: 73429
  source 1..933: mol_type = other DNA

SEQ ID NO: 74997 - DNA, 240 bp, synthetic construct; identical to SEQ ID NO: 73430
  source 1..240: mol_type = other DNA

SEQ ID NO: 74998 - DNA, 207 bp, synthetic construct; identical to SEQ ID NO: 73431
  source 1..207: mol_type = other DNA

SEQ ID NO: 74999 - DNA, 717 bp, synthetic construct; identical to SEQ ID NO: 73432
  source 1..717: mol_type = other DNA

SEQ ID NO: 75000 - DNA, 330 bp, synthetic construct; identical to SEQ ID NO: 73433
  source 1..330: mol_type = other DNA

SEQ ID NO: 75001 - DNA, 816 bp, synthetic construct; identical to SEQ ID NO: 73434
  source 1..816: mol_type = other DNA

SEQ ID NO: 75002 - DNA, 702 bp, synthetic construct; identical to SEQ ID NO: 73435
  source 1..702: mol_type = other DNA

SEQ ID NO: 75003 - DNA, 879 bp, synthetic construct; identical to SEQ ID NO: 73436
  source 1..879: mol_type = other DNA

SEQ ID NO: 75004 - DNA, 1332 bp, synthetic construct; identical to SEQ ID NO: 73437
  source 1..1332: mol_type = other DNA

SEQ ID NO: 75005 - DNA, 1173 bp, synthetic construct; identical to SEQ ID NO: 73438
  source 1..1173: mol_type = other DNA

SEQ ID NO: 75006 - DNA, 1320 bp, synthetic construct; identical to SEQ ID NO: 73439
  source 1..1320: mol_type = other DNA

SEQ ID NO: 75007 - DNA, 945 bp, synthetic construct; identical to SEQ ID NO: 73440
  source 1..945: mol_type = other DNA

SEQ ID NO: 75008 - DNA, 1023 bp, synthetic construct; identical to SEQ ID NO: 73443
  source 1..1023: mol_type = other DNA

SEQ ID NO: 75009 - DNA, 726 bp, synthetic construct; identical to SEQ ID NO: 73445
  source 1..726: mol_type = other DNA

SEQ ID NO: 75010 - DNA, 1479 bp, synthetic construct; identical to SEQ ID NO: 73447
  source 1..1479: mol_type = other DNA

SEQ ID NO: 75011 - DNA, 999 bp, synthetic construct; identical to SEQ ID NO: 73448
  source 1..999: mol_type = other DNA

SEQ ID NO: 75012 - DNA, 447 bp, synthetic construct; identical to SEQ ID NO: 73449
  source 1..447: mol_type = other DNA

SEQ ID NO: 75013 - DNA, 492 bp, synthetic construct; identical to SEQ ID NO: 73450
  source 1..492: mol_type = other DNA

SEQ ID NO: 75014 - DNA, 252 bp, synthetic construct; identical to SEQ ID NO: 73451
  source 1..252: mol_type = other DNA

SEQ ID NO: 75015 - DNA, 282 bp, synthetic construct; identical to SEQ ID NO: 73453
  source 1..282: mol_type = other DNA

SEQ ID NO: 75016 - DNA, 336 bp, synthetic construct; identical to SEQ ID NO: 73454
  source 1..336: mol_type = other DNA

SEQ ID NO: 75017 - DNA, 1455 bp, synthetic construct; identical to SEQ ID NO: 73455
  source 1..1455: mol_type = other DNA

SEQ ID NO: 75018 - DNA, 387 bp, synthetic construct; identical to SEQ ID NO: 73456
  source 1..387: mol_type = other DNA

SEQ ID NO: 75019 - DNA, 423 bp, synthetic construct; identical to SEQ ID NO: 73458
  source 1..423: mol_type = other DNA

SEQ ID NO: 75020 - DNA, 267 bp, synthetic construct; identical to SEQ ID NO: 73459
  source 1..267: mol_type = other DNA

SEQ ID NO: 75021 - DNA, 966 bp, synthetic construct; identical to SEQ ID NO: 73461
  source 1..966: mol_type = other DNA

SEQ ID NO: 75022 - DNA, 705 bp, synthetic construct; identical to SEQ ID NO: 73462
  source 1..705: mol_type = other DNA

SEQ ID NO: 75023 - DNA, 1134 bp, synthetic construct; identical to SEQ ID NO: 73463
  source 1..1134: mol_type = other DNA

SEQ ID NO: 75024 - DNA, 1434 bp, synthetic construct; identical to SEQ ID NO: 73465
  source 1..1434: mol_type = other DNA

SEQ ID NO: 75025 - DNA, 807 bp, synthetic construct; identical to SEQ ID NO: 73467
  source 1..807: mol_type = other DNA

SEQ ID NO: 75026 - DNA, 1425 bp, synthetic construct; identical to SEQ ID NO: 73469
  source 1..1425: mol_type = other DNA

SEQ ID NO: 75027 - DNA, 4815 bp, synthetic construct; identical to SEQ ID NO: 73473
  source 1..4815: mol_type = other DNA

SEQ ID NO: 75028 - DNA, 843 bp, synthetic construct; identical to SEQ ID NO: 73474
  source 1..843: mol_type = other DNA

SEQ ID NO: 75029 - DNA, 531 bp, synthetic construct; identical to SEQ ID NO: 73475
  source 1..531: mol_type = other DNA

SEQ ID NO: 75030 - DNA, 411 bp, synthetic construct; identical to SEQ ID NO: 73476
  source 1..411: mol_type = other DNA

SEQ ID NO: 75031 - DNA, 570 bp, synthetic construct; identical to SEQ ID NO: 73477
  source 1..570: mol_type = other DNA

SEQ ID NO: 75032 - DNA, 1215 bp, synthetic construct; identical to SEQ ID NO: 73478
  source 1..1215: mol_type = other DNA

SEQ ID NO: 75033 - DNA, 402 bp, synthetic construct; identical to SEQ ID NO: 73480
  source 1..402: mol_type = other DNA

SEQ ID NO: 75034 - DNA, 777 bp, synthetic construct; identical to SEQ ID NO: 73481
  source 1..777: mol_type = other DNA

SEQ ID NO: 75035 - DNA, 2493 bp, synthetic construct; identical to SEQ ID NO: 73482
  source 1..2493: mol_type = other DNA

SEQ ID NO: 75036 - DNA, 438 bp, synthetic construct; identical to SEQ ID NO: 73483
  source 1..438: mol_type = other DNA

SEQ ID NO: 75037 - DNA, 486 bp, synthetic construct; identical to SEQ ID NO: 73485
  source 1..486: mol_type = other DNA

SEQ ID NO: 75038 - DNA, 906 bp, synthetic construct; identical to SEQ ID NO: 73486
  source 1..906: mol_type = other DNA

SEQ ID NO: 75039 - DNA, 408 bp, synthetic construct; identical to SEQ ID NO: 73487
  source 1..408: mol_type = other DNA

SEQ ID NO: 75040 - DNA, 216 bp, synthetic construct; identical to SEQ ID NO: 73488
  source 1..216: mol_type = other DNA

SEQ ID NO: 75041 - DNA, 2121 bp, synthetic construct; identical to SEQ ID NO: 73489
  source 1..2121: mol_type = other DNA

SEQ ID NO: 75042 - DNA, 852 bp, synthetic construct; identical to SEQ ID NO: 73490
  source 1..852: mol_type = other DNA

SEQ ID NO: 75043 - DNA, 330 bp, synthetic construct; identical to SEQ ID NO: 73492
  source 1..330: mol_type = other DNA

SEQ ID NO: 75044 - DNA, 957 bp, synthetic construct; identical to SEQ ID NO: 73493
  source 1..957: mol_type = other DNA

SEQ ID NO: 75045 - DNA, 585 bp, synthetic construct; identical to SEQ ID NO: 73498
  source 1..585: mol_type = other DNA

SEQ ID NO: 75046 - DNA, 339 bp, synthetic construct; identical to SEQ ID NO: 73499
  source 1..339: mol_type = other DNA

SEQ ID NO: 75047 - DNA, 684 bp, synthetic construct; identical to SEQ ID NO: 73501
  source 1..684: mol_type = other DNA

SEQ ID NO: 75048 - DNA, 516 bp, synthetic construct; identical to SEQ ID NO: 73502
  source 1..516: mol_type = other DNA

SEQ ID NO: 75049 - DNA, 2931 bp, synthetic construct; identical to SEQ ID NO: 73503
  source 1..2931: mol_type = other DNA

SEQ ID NO: 75050 - DNA, 624 bp, synthetic construct; identical to SEQ ID NO: 73504
  source 1..624: mol_type = other DNA

SEQ ID NO: 75051 - DNA, 483 bp, synthetic construct; identical to SEQ ID NO: 73505
  source 1..483: mol_type = other DNA

SEQ ID NO: 75052 - DNA, 1062 bp, synthetic construct; identical to SEQ ID NO: 73506
  source 1..1062: mol_type = other DNA

SEQ ID NO: 75053 - DNA, 903 bp, synthetic construct; identical to SEQ ID NO: 73507
  source 1..903: mol_type = other DNA

SEQ ID NO: 75054 - DNA, 333 bp, synthetic construct; identical to SEQ ID NO: 73508
  source 1..333: mol_type = other DNA

SEQ ID NO: 75055 - DNA, 834 bp, synthetic construct; identical to SEQ ID NO: 73509
  source 1..834: mol_type = other DNA

SEQ ID NO: 75056 - DNA, 1365 bp, synthetic construct; identical to SEQ ID NO: 73510
  source 1..1365: mol_type = other DNA

SEQ ID NO: 75057 - DNA, 426 bp, synthetic construct; identical to SEQ ID NO: 73511
  source 1..426: mol_type = other DNA

SEQ ID NO: 75058 - DNA, 1113 bp, synthetic construct; identical to SEQ ID NO: 73512
  source 1..1113: mol_type = other DNA

SEQ ID NO: 75059 - DNA, 1206 bp, synthetic construct; identical to SEQ ID NO: 73515
  source 1..1206: mol_type = other DNA

SEQ ID NO: 75060 - DNA, 408 bp, synthetic construct; identical to SEQ ID NO: 73518
  source 1..408: mol_type = other DNA

SEQ ID NO: 75061 - DNA, 1644 bp, synthetic construct; identical to SEQ ID NO: 73520
  source 1..1644: mol_type = other DNA

SEQ ID NO: 75062 - DNA, 1305 bp, synthetic construct; identical to SEQ ID NO: 73521
  source 1..1305: mol_type = other DNA

SEQ ID NO: 75063 - DNA, 1035 bp, synthetic construct; identical to SEQ ID NO: 73523
  source 1..1035: mol_type = other DNA

SEQ ID NO: 75064 - DNA, 1272 bp, synthetic construct; identical to SEQ ID NO: 73527
  source 1..1272: mol_type = other DNA

SEQ ID NO: 75065 - DNA, 867 bp, synthetic construct; identical to SEQ ID NO: 73528
  source 1..867: mol_type = other DNA

SEQ ID NO: 75066 - DNA, 939 bp, synthetic construct; identical to SEQ ID NO: 73529
  source 1..939: mol_type = other DNA

SEQ ID NO: 75067 - DNA, 1698 bp, synthetic construct; identical to SEQ ID NO: 73531
  source 1..1698: mol_type = other DNA

SEQ ID NO: 75068 - DNA, 102 bp, synthetic construct; identical to SEQ ID NO: 73532
  source 1..102: mol_type = other DNA

SEQ ID NO: 75069 - DNA, 1245 bp, synthetic construct; identical to SEQ ID NO: 73533
  source 1..1245: mol_type = other DNA

SEQ ID NO: 75070 - DNA, 318 bp, synthetic construct; identical to SEQ ID NO: 73537
  source 1..318: mol_type = other DNA

SEQ ID NO: 75071 - DNA, 279 bp, synthetic construct; identical to SEQ ID NO: 73538
  source 1..279: mol_type = other DNA

SEQ ID NO: 75072 - DNA, 1080 bp, synthetic construct; identical to SEQ ID NO: 73539
  source 1..1080: mol_type = other DNA

SEQ ID NO: 75073 - DNA, 960 bp, synthetic construct; identical to SEQ ID NO: 73541
  source 1..960: mol_type = other DNA

SEQ ID NO: 75074 - DNA, 858 bp, synthetic construct; identical to SEQ ID NO: 73542
  source 1..858: mol_type = other DNA

SEQ ID NO: 75075 - DNA, 1404 bp, synthetic construct; identical to SEQ ID NO: 73543
  source 1..1404: mol_type = other DNA

SEQ ID NO: 75076 - DNA, 1131 bp, synthetic construct; identical to SEQ ID NO: 73545
  source 1..1131: mol_type = other DNA

SEQ ID NO: 75077 - DNA, 705 bp, synthetic construct; identical to SEQ ID NO: 73546
  source 1..705: mol_type = other DNA

SEQ ID NO: 75078 - DNA, 963 bp, synthetic construct; identical to SEQ ID NO: 73547
  source 1..963: mol_type = other DNA

SEQ ID NO: 75079 - DNA, 312 bp, synthetic construct; identical to SEQ ID NO: 73548
  source 1..312: mol_type = other DNA

SEQ ID NO: 75080 - DNA, 1377 bp, synthetic construct; identical to SEQ ID NO: 73551
  source 1..1377: mol_type = other DNA

SEQ ID NO: 75081 - DNA, 804 bp, synthetic construct; identical to SEQ ID NO: 73552
  source 1..804: mol_type = other DNA

SEQ ID NO: 75082 - DNA, 1098 bp, synthetic construct; identical to SEQ ID NO: 73553
  source 1..1098: mol_type = other DNA

SEQ ID NO: 75083 - DNA, 231 bp, synthetic construct; identical to SEQ ID NO: 73554
  source 1..231: mol_type = other DNA

SEQ ID NO: 75084 - DNA, 570 bp, synthetic construct; identical to SEQ ID NO: 73555
  source 1..570: mol_type = other DNA

SEQ ID NO: 75085 - DNA, 1683 bp, synthetic construct; identical to SEQ ID NO: 73556
  source 1..1683: mol_type = other DNA

SEQ ID NO: 75086 - DNA, 2679 bp, synthetic construct; identical to SEQ ID NO: 73558
  source 1..2679: mol_type = other DNA

SEQ ID NO: 75087 - DNA, 447 bp, synthetic construct; identical to SEQ ID NO: 73559
  source 1..447: mol_type = other DNA

SEQ ID NO: 75088 - DNA, 942 bp, synthetic construct; identical to SEQ ID NO: 73562
  source 1..942: mol_type = other DNA

SEQ ID NO: 75089 - DNA, 675 bp, synthetic construct; identical to SEQ ID NO: 73563
  source 1..675: mol_type = other DNA

SEQ ID NO: 75090 - DNA, 5712 bp, synthetic construct; identical to SEQ ID NO: 73565
  source 1..5712: mol_type = other DNA

SEQ ID NO: 75091 - DNA, 492 bp, synthetic construct; identical to SEQ ID NO: 73567
  source 1..492: mol_type = other DNA

SEQ ID NO: 75092 - DNA, 1455 bp, synthetic construct; identical to SEQ ID NO: 73571
  source 1..1455: mol_type = other DNA

SEQ ID NO: 75093 - DNA, 732 bp, synthetic construct; identical to SEQ ID NO: 73573
  source 1..732: mol_type = other DNA

SEQ ID NO: 75094 - DNA, 627 bp, synthetic construct; identical to SEQ ID NO: 73575
  source 1..627: mol_type = other DNA

SEQ ID NO: 75095 - DNA, 558 bp, synthetic construct; identical to SEQ ID NO: 73577
  source 1..558: mol_type = other DNA

SEQ ID NO: 75096 - DNA, 675 bp, synthetic construct; identical to SEQ ID NO: 73578
  source 1..675: mol_type = other DNA

SEQ ID NO: 75097 - DNA, 651 bp, synthetic construct; identical to SEQ ID NO: 73579
  source 1..651: mol_type = other DNA

SEQ ID NO: 75098 - DNA, 180 bp, synthetic construct; identical to SEQ ID NO: 73580
  source 1..180: mol_type = other DNA

SEQ ID NO: 75099 - DNA, 321 bp, synthetic construct; identical to SEQ ID NO: 73581
  source 1..321: mol_type = other DNA

SEQ ID NO: 75100 - DNA, 696 bp, synthetic construct; identical to SEQ ID NO: 73583
  source 1..696: mol_type = other DNA

SEQ ID NO: 75101 - DNA, 399 bp, synthetic construct; identical to SEQ ID NO: 73584
  source 1..399: mol_type = other DNA

SEQ ID NO: 75102 - DNA, 4473 bp, synthetic construct; identical to SEQ ID NO: 73585
  source 1..4473: mol_type = other DNA

SEQ ID NO: 75103 - DNA, 324 bp, synthetic construct; identical to SEQ ID NO: 73586
  source 1..324: mol_type = other DNA

SEQ ID NO: 75104 - DNA, 333 bp, synthetic construct; identical to SEQ ID NO: 73587
  source 1..333: mol_type = other DNA

SEQ ID NO: 75105 - DNA, 963 bp, synthetic construct; identical to SEQ ID NO: 73588
  source 1..963: mol_type = other DNA

SEQ ID NO: 75106 - DNA, 909 bp, synthetic construct; identical to SEQ ID NO: 73589
  source 1..909: mol_type = other DNA

SEQ ID NO: 75107 - DNA, 1887 bp, synthetic construct; identical to SEQ ID NO: 73590
  source 1..1887: mol_type = other DNA

SEQ ID NO: 75108 - DNA, 3057 bp, synthetic construct; identical to SEQ ID NO: 73593
  source 1..3057: mol_type = other DNA

SEQ ID NO: 75109 - DNA, 570 bp, synthetic construct; identical to SEQ ID NO: 73596
  source 1..570: mol_type = other DNA

SEQ ID NO: 75110 - DNA, 1779 bp, synthetic construct; identical to SEQ ID NO: 73597
  source 1..1779: mol_type = other DNA

SEQ ID NO: 75111 - DNA, 729 bp, synthetic construct; identical to SEQ ID NO: 73600
  source 1..729: mol_type = other DNA

SEQ ID NO: 75112 - DNA, 1254 bp, synthetic construct; identical to SEQ ID NO: 73603
  source 1..1254: mol_type = other DNA

SEQ ID NO: 75113 - DNA, 2019 bp, synthetic construct; identical to SEQ ID NO: 73605
  source 1..2019: mol_type = other DNA

SEQ ID NO: 75114 - DNA, 843 bp, synthetic construct; identical to SEQ ID NO: 73606
  source 1..843: mol_type = other DNA

SEQ ID NO: 75115 - DNA, 831 bp, synthetic construct; identical to SEQ ID NO: 73607
  source 1..831: mol_type = other DNA

SEQ ID NO: 75116 - DNA, 639 bp, synthetic construct; identical to SEQ ID NO: 73609
  source 1..639: mol_type = other DNA

SEQ ID NO: 75117 - DNA, 1275 bp, synthetic construct; identical to SEQ ID NO: 73610
  source 1..1275: mol_type = other DNA

SEQ ID NO: 75118 - DNA, 774 bp, synthetic construct; identical to SEQ ID NO: 73611
  source 1..774: mol_type = other DNA

SEQ ID NO: 75119 - DNA, 900 bp, synthetic construct; identical to SEQ ID NO: 73612
  source 1..900: mol_type = other DNA

SEQ ID NO: 75120 - DNA, 501 bp, synthetic construct; identical to SEQ ID NO: 73613
  source 1..501: mol_type = other DNA

SEQ ID NO: 75121 - DNA, 483 bp, synthetic construct; identical to SEQ ID NO: 73616
  source 1..483: mol_type = other DNA

SEQ ID NO: 75122 - protein, 454 aa, Methanobrevibacter gottschalkii; identical to SEQ ID NO: 10302

SEQ ID NO: 75123 - protein, 356 aa, Methanobrevibacter gottschalkii; identical to SEQ ID NO: 10322

SEQ ID NO: 75124 - protein, 227 aa, Methanobrevibacter gottschalkii; identical to SEQ ID NO: 10343

SEQ ID NO: 75125 - protein, 295 aa, Methanobrevibacter gottschalkii; identical to SEQ ID NO: 10355

SEQ ID NO: 75126 - protein, 269 aa, Methanobrevibacter gottschalkii; identical to SEQ ID NO: 10367

SEQ ID NO: 75127 - protein, 193 aa, Methanobrevibacter gottschalkii; identical to SEQ ID NO: 10405

SEQ ID NO: 75128 - protein, 213 aa, Methanobrevibacter gottschalkii; identical to SEQ ID NO: 10411

SEQ ID NO: 75129 - protein, 211 aa, Methanobrevibacter gottschalkii; identical to SEQ ID NO: 10495

SEQ ID NO: 75130 - protein, 709 aa, Methanobrevibacter gottschalkii; identical to SEQ ID NO: 10527

SEQ ID NO: 75131 - protein, 1312 aa, Methanobrevibacter gottschalkii; identical to SEQ ID NO: 10591

SEQ ID NO: 75132 - protein, 104 aa, Methanobrevibacter gottschalkii; identical to SEQ ID NO: 10608

SEQ ID NO: 75133 - protein, 601 aa, Methanobrevibacter gottschalkii; identical to SEQ ID NO: 10629

SEQ ID NO: 75134 - protein, 568 aa, Methanobrevibacter gottschalkii; identical to SEQ ID NO: 10630

SEQ ID NO: 75135 - protein, 123 aa, Methanobrevibacter gottschalkii; identical to SEQ ID NO: 10633

SEQ ID NO: 75136 - protein, 271 aa, Methanobrevibacter gottschalkii; identical to SEQ ID NO: 10655

SEQ ID NO: 75137 - protein, 250 aa, Methanobrevibacter gottschalkii; identical to SEQ ID NO: 10658

SEQ ID NO: 75138 - protein, 237 aa, Methanobrevibacter gottschalkii; identical to SEQ ID NO: 10665

SEQ ID NO: 75139 - protein, 1218 aa, Methanobrevibacter gottschalkii; identical to SEQ ID NO: 10671

SEQ ID NO: 75140 - protein, 549 aa, Methanobrevibacter gottschalkii; identical to SEQ ID NO: 10727

SEQ ID NO: 75141 - protein, 887 aa, Methanobrevibacter gottschalkii; identical to SEQ ID NO: 10758

SEQ ID NO: 75142 - protein, 182 aa, Methanobrevibacter gottschalkii; identical to SEQ ID NO: 10762

SEQ ID NO: 75143 - protein, 596 aa, Methanobrevibacter gottschalkii; identical to SEQ ID NO: 10839

SEQ ID NO: 75144 - protein, 581 aa, Methanobrevibacter gottschalkii; identical to SEQ ID NO: 10840

SEQ ID NO: 75145 - protein, 193 aa, Methanobrevibacter gottschalkii; identical to SEQ ID NO: 10841

SEQ ID NO: 75146 - protein, 477 aa, Methanobrevibacter gottschalkii; identical to SEQ ID NO: 10843

SEQ ID NO: 75147 - protein, 784 aa, Methanobrevibacter gottschalkii; identical to SEQ ID NO: 10850

SEQ ID NO: 75148 - protein, 456 aa, Methanobrevibacter gottschalkii; identical to SEQ ID NO: 10851

SEQ ID NO: 75149 - protein, 539 aa, Methanobrevibacter gottschalkii; identical to SEQ ID NO: 10857

SEQ ID NO: 75150 - protein, 425 aa, Methanobrevibacter gottschalkii; identical to SEQ ID NO: 10874

SEQ ID NO: 75151 - protein, 246 aa, Methanobrevibacter gottschalkii; identical to SEQ ID NO: 10905

SEQ ID NO: 75152 - protein, 128 aa, Methanobrevibacter gottschalkii; identical to SEQ ID NO: 10931

SEQ ID NO: 75153 - protein, 302 aa, Methanobrevibacter gottschalkii; identical to SEQ ID NO: 10932

SEQ ID NO: 75154 - protein, 185 aa, Methanobrevibacter gottschalkii; identical to SEQ ID NO: 10984

SEQ ID NO: 75155 - protein, 140 aa, Methanobrevibacter gottschalkii; identical to SEQ ID NO: 10990

SEQ ID NO: 75156 - protein, 551 aa, Methanobrevibacter gottschalkii; identical to SEQ ID NO: 11010

SEQ ID NO: 75157 - protein, 443 aa, Methanobrevibacter gottschalkii; identical to SEQ ID NO: 11013

SEQ ID NO: 75158 - protein, 312 aa, Methanobrevibacter gottschalkii; identical to SEQ ID NO: 11032

SEQ ID NO: 75159 - protein, 698 aa, Methanobrevibacter gottschalkii; identical to SEQ ID NO: 11037

SEQ ID NO: 75160 - protein, 155 aa, Methanobrevibacter gottschalkii; identical to SEQ ID NO: 11069

SEQ ID NO: 75161 - protein, 332 aa, Methanobrevibacter gottschalkii; identical to SEQ ID NO: 11073

SEQ ID NO: 75162 - protein, 495 aa, Methanobrevibacter gottschalkii; identical to SEQ ID NO: 11083

SEQ ID NO: 75163 - protein, 682 aa, Methanobrevibacter gottschalkii; identical to SEQ ID NO: 11134

SEQ ID NO: 75164 - protein, 221 aa, Methanobrevibacter gottschalkii; identical to SEQ ID NO: 11140

SEQ ID NO: 75165 - protein, 95 aa, Methanobrevibacter gottschalkii; identical to SEQ ID NO: 11141

SEQ ID NO: 75166 - protein, 229 aa, Methanobrevibacter gottschalkii; identical to SEQ ID NO: 11142

SEQ ID NO: 75167 - protein, 179 aa, Methanobrevibacter gottschalkii; identical to SEQ ID NO: 11177

SEQ ID NO: 75168 - protein, 211 aa, Methanobrevibacter gottschalkii; identical to SEQ ID NO: 11226

SEQ ID NO: 75169 - protein, 451 aa, Methanobrevibacter gottschalkii; identical to SEQ ID NO: 11227

SEQ ID NO: 75170 - protein, 243 aa, Methanobrevibacter gottschalkii; identical to SEQ ID NO: 11273

SEQ ID NO: 75171 - protein, 342 aa, Methanobrevibacter gottschalkii; identical to SEQ ID NO: 11274

SEQ ID NO: 75172 - protein, 209 aa, Methanobrevibacter gottschalkii; identical to SEQ ID NO: 11299

SEQ ID NO: 75173 - protein, 337 aa, Methanobrevibacter gottschalkii; identical to SEQ ID NO: 11305

SEQ ID NO: 75174 - protein, 363 aa, Methanobrevibacter gottschalkii; identical to SEQ ID NO: 11329

SEQ ID NO: 75175 - protein, 356 aa, Methanobrevibacter gottschalkii; identical to SEQ ID NO: 11341

SEQ ID NO: 75176 - protein, 565 aa, Methanobrevibacter gottschalkii; identical to SEQ ID NO: 11350

SEQ ID NO: 75177 - protein, 461 aa, Methanobrevibacter gottschalkii; identical to SEQ ID NO: 11355

SEQ ID NO: 75178 - protein, 177 aa, Methanobrevibacter gottschalkii; identical to SEQ ID NO: 11367

SEQ ID NO: 75179 - protein, 641 aa, Methanobrevibacter gottschalkii; identical to SEQ ID NO: 11368

SEQ ID NO: 75180 - protein, 172 aa, Methanobrevibacter gottschalkii; identical to SEQ ID NO: 11385

SEQ ID NO: 75181 - protein, 809 aa, Methanobrevibacter gottschalkii; identical to SEQ ID NO: 11388

SEQ ID NO: 75182 - protein, 312 aa, Methanobrevibacter gottschalkii; identical to SEQ ID NO: 11447

SEQ ID NO: 75183 - protein, 622 aa, Methanobrevibacter gottschalkii; identical to SEQ ID NO: 11452

SEQ ID NO: 75184 - protein, 355 aa, Methanobrevibacter gottschalkii; identical to SEQ ID NO: 11457

SEQ ID NO: 75185 - protein, 310 aa, Methanobrevibacter gottschalkii; identical to SEQ ID NO: 11494

SEQ ID NO: 75186 - protein, 68 aa, Methanobrevibacter gottschalkii; identical to SEQ ID NO: 11496

SEQ ID NO: 75187 - protein, 238 aa, Methanobrevibacter gottschalkii; identical to SEQ ID NO: 11497

SEQ ID NO: 75188 - protein, 271 aa, Methanobrevibacter gottschalkii; identical to SEQ ID NO: 11499

SEQ ID NO: 75189 - protein, 233 aa, Methanobrevibacter gottschalkii; identical to SEQ ID NO: 11500

SEQ ID NO: 75190 - protein, 443 aa, Methanobrevibacter gottschalkii; identical to SEQ ID NO: 11506

SEQ ID NO: 75191 - protein, 390 aa, Methanobrevibacter gottschalkii; identical to SEQ ID NO: 11511

SEQ ID NO: 75192 - protein, 439 aa, Methanobrevibacter gottschalkii; identical to SEQ ID NO: 11513

SEQ ID NO: 75193 - protein, 340 aa, Methanobrevibacter gottschalkii; identical to SEQ ID NO: 11530

SEQ ID NO: 75194 - protein, 492 aa, Methanobrevibacter gottschalkii; identical to SEQ ID NO: 11544

SEQ ID NO: 75195 - protein, 484 aa, Methanobrevibacter gottschalkii; identical to SEQ ID NO: 11558

SEQ ID NO: 75196 - protein, 128 aa, Methanobrevibacter gottschalkii; identical to SEQ ID NO: 11559

SEQ ID NO: 75197 - protein, 474 aa, Methanobrevibacter gottschalkii; identical to SEQ ID NO: 11584

SEQ ID NO: 75198 - protein, 189 aa, Methanobrevibacter gottschalkii; identical to SEQ ID NO: 11604

SEQ ID NO: 75199 - protein, 404 aa, Methanobrevibacter gottschalkii; identical to SEQ ID NO: 11605

SEQ ID NO: 75200 - protein, 830 aa, Methanobrevibacter gottschalkii; identical to SEQ ID NO: 11626

SEQ ID NO: 75201 - protein, 161 aa, Methanobrevibacter gottschalkii; identical to SEQ ID NO: 11636

SEQ ID NO: 75202 - protein, 283 aa, Methanobrevibacter gottschalkii; identical to SEQ ID NO: 11644

SEQ ID NO: 75203 - protein, 194 aa, Methanobrevibacter gottschalkii; identical to SEQ ID NO: 11678

SEQ ID NO: 75204 - protein, 454 aa, Methanobrevibacter gottschalkii; identical to SEQ ID NO: 11705

SEQ ID NO: 75205 - protein, 547 aa, Methanobrevibacter gottschalkii; identical to SEQ ID NO: 11734

SEQ ID NO: 75206 - protein, 434 aa, Methanobrevibacter gottschalkii; identical to SEQ ID NO: 11735

SEQ ID NO: 75207 - protein, 565 aa, Methanobrevibacter gottschalkii; identical to SEQ ID NO: 11763

SEQ ID NO: 75208 - protein, 359 aa, Methanobrevibacter gottschalkii; identical to SEQ ID NO: 11780

SEQ ID NO: 75209 - protein, 319 aa, Methanobrevibacter gottschalkii; identical to SEQ ID NO: 11782

SEQ ID NO: 75210 - protein, 467 aa, Methanobrevibacter gottschalkii; identical to SEQ ID NO: 11784

SEQ ID NO: 75211 - protein, 234 aa, Methanobrevibacter gottschalkii; identical to SEQ ID NO: 11801

SEQ ID NO: 75212 - protein, 267 aa, Methanobrevibacter gottschalkii; identical to SEQ ID NO: 11839

SEQ ID NO: 75213 - protein, 189 aa, Methanobrevibacter gottschalkii; identical to SEQ ID NO: 11847

SEQ ID NO: 75214 - protein, 313 aa, Methanobrevibacter gottschalkii; identical to SEQ ID NO: 11890

SEQ ID NO: 75215 - protein, 224 aa, Methanobrevibacter gottschalkii; identical to SEQ ID NO: 11899

SEQ ID NO: 75216 - protein, 484 aa, Methanobrevibacter gottschalkii; identical to SEQ ID NO: 11912

SEQ ID NO: 75217 - protein, 628 aa, Methanobrevibacter gottschalkii; identical to SEQ ID NO: 11976

SEQ ID NO: 75218 - protein, 189 aa, Methanobrevibacter gottschalkii; identical to SEQ ID NO: 11994

SEQ ID NO: 75219 - protein, 672 aa, Methanobrevibacter gottschalkii; identical to SEQ ID NO: 12013

SEQ ID NO: 75220 - protein, 212 aa, Methanobrevibacter gottschalkii; identical to SEQ ID NO: 12019

SEQ ID NO: 75221 - DNA, 1365 bp, Methanobrevibacter gottschalkii; identical to SEQ ID NO: 6702
  source 1..1365: mol_type = genomic DNA

SEQ ID NO: 75222 - DNA, 1071 bp, Methanobrevibacter gottschalkii; identical to SEQ ID NO: 6722
  source 1..1071: mol_type = genomic DNA

SEQ ID NO: 75223 - DNA, 684 bp, Methanobrevibacter gottschalkii; identical to SEQ ID NO: 6743
  source 1..684: mol_type = genomic DNA

SEQ ID NO: 75224 - DNA, 888 bp, Methanobrevibacter gottschalkii; identical to SEQ ID NO: 6755
  source 1..888: mol_type = genomic DNA

SEQ ID NO: 75225 - DNA, 810 bp, Methanobrevibacter gottschalkii; identical to SEQ ID NO: 6767
  source 1..810: mol_type = genomic DNA

SEQ ID NO: 75226 - DNA, 582 bp, Methanobrevibacter gottschalkii; identical to SEQ ID NO: 6805
  source 1..582: mol_type = genomic DNA

SEQ ID NO: 75227 - DNA, 642 bp, Methanobrevibacter gottschalkii; identical to SEQ ID NO: 6811
  source 1..642: mol_type = genomic DNA

SEQ ID NO: 75228 - DNA, 636 bp, Methanobrevibacter gottschalkii; identical to SEQ ID NO: 6895
  source 1..636: mol_type = genomic DNA

SEQ ID NO: 75229 - DNA, 2130 bp, Methanobrevibacter gottschalkii; identical to SEQ ID NO: 6927
  source 1..2130: mol_type = genomic DNA

SEQ ID NO: 75230 - DNA, 3939 bp, Methanobrevibacter gottschalkii; identical to SEQ ID NO: 6991
  source 1..3939: mol_type = genomic DNA

SEQ ID NO: 75231 - DNA, 315 bp, Methanobrevibacter gottschalkii; identical to SEQ ID NO: 7008
  source 1..315: mol_type = genomic DNA

SEQ ID NO: 75232 - DNA, 1806 bp, Methanobrevibacter gottschalkii; identical to SEQ ID NO: 7029
  source 1..1806: mol_type = genomic DNA

SEQ ID NO: 75233 - DNA, 1707 bp, Methanobrevibacter gottschalkii; identical to SEQ ID NO: 7030
  source 1..1707: mol_type = genomic DNA

SEQ ID NO: 75234 - DNA, 372 bp, Methanobrevibacter gottschalkii; identical to SEQ ID NO: 7033
  source 1..372: mol_type = genomic DNA

SEQ ID NO: 75235 - DNA, 816 bp, Methanobrevibacter gottschalkii; identical to SEQ ID NO: 7055
  source 1..816: mol_type = genomic DNA

SEQ ID NO: 75236 - DNA, 753 bp, Methanobrevibacter gottschalkii; identical to SEQ ID NO: 7058
  source 1..753: mol_type = genomic DNA

SEQ ID NO: 75237 - DNA, 714 bp, Methanobrevibacter gottschalkii; identical to SEQ ID NO: 7065
  source 1..714: mol_type = genomic DNA

SEQ ID NO: 75238 - DNA, 3657 bp, Methanobrevibacter gottschalkii; identical to SEQ ID NO: 7071
  source 1..3657: mol_type = genomic DNA

SEQ ID NO: 75239 - DNA, 1650 bp, Methanobrevibacter gottschalkii; identical to SEQ ID NO: 7127
  source 1..1650: mol_type = genomic DNA

SEQ ID NO: 75240 - DNA, 2664 bp, Methanobrevibacter gottschalkii; identical to SEQ ID NO: 7158
  source 1..2664: mol_type = genomic DNA

SEQ ID NO: 75241 - DNA, 549 bp, Methanobrevibacter gottschalkii; identical to SEQ ID NO: 7162
  source 1..549: mol_type = genomic DNA

SEQ ID NO: 75242 - DNA, 1791 bp, Methanobrevibacter gottschalkii; identical to SEQ ID NO: 7239
  source 1..1791: mol_type = genomic DNA

SEQ ID NO: 75243 - DNA, 1746 bp, Methanobrevibacter gottschalkii; identical to SEQ ID NO: 7240
  source 1..1746: mol_type = genomic DNA

SEQ ID NO: 75244 - DNA, 582 bp, Methanobrevibacter gottschalkii; identical to SEQ ID NO: 7241
  source 1..582: mol_type = genomic DNA

SEQ ID NO: 75245 - DNA, 1434 bp, Methanobrevibacter gottschalkii; identical to SEQ ID NO: 7243
  source 1..1434: mol_type = genomic DNA

SEQ ID NO: 75246 - DNA, 2355 bp, Methanobrevibacter gottschalkii; identical to SEQ ID NO: 7250
  source 1..2355: mol_type = genomic DNA

SEQ ID NO: 75247 - DNA, 1371 bp, Methanobrevibacter gottschalkii; identical to SEQ ID NO: 7251
  source 1..1371: mol_type = genomic DNA

SEQ ID NO: 75248 - DNA, 1620 bp, Methanobrevibacter gottschalkii; identical to SEQ ID NO: 7257
  source 1..1620: mol_type = genomic DNA

SEQ ID NO: 75249 - DNA, 1278 bp, Methanobrevibacter gottschalkii; identical to SEQ ID NO: 7274
  source 1..1278: mol_type = genomic DNA

SEQ ID NO: 75250 - DNA, 741 bp, Methanobrevibacter gottschalkii; identical to SEQ ID NO: 7305
  source 1..741: mol_type = genomic DNA

SEQ ID NO: 75251 - DNA, 387 bp, Methanobrevibacter gottschalkii; identical to SEQ ID NO: 7331
  source 1..387: mol_type = genomic DNA

SEQ ID NO: 75252 - DNA, 909 bp, Methanobrevibacter gottschalkii; identical to SEQ ID NO: 7332
  source 1..909: mol_type = genomic DNA

SEQ ID NO: 75253 - DNA, 558 bp, Methanobrevibacter gottschalkii; identical to SEQ ID NO: 7384
  source 1..558: mol_type = genomic DNA

SEQ ID NO: 75254 - DNA, 423 bp, Methanobrevibacter gottschalkii; identical to SEQ ID NO: 7390
  source 1..423: mol_type = genomic DNA

SEQ ID NO: 75255 - DNA, 1656 bp, Methanobrevibacter gottschalkii; identical to SEQ ID NO: 7410
  source 1..1656: mol_type = genomic DNA

SEQ ID NO: 75256 - DNA, 1332 bp, Methanobrevibacter gottschalkii; identical to SEQ ID NO: 7413
  source 1..1332: mol_type = genomic DNA

SEQ ID NO: 75257 - DNA, 939 bp, Methanobrevibacter gottschalkii; identical to SEQ ID NO: 7432
  source 1..939: mol_type = genomic DNA

SEQ ID NO: 75258 - DNA, 2097 bp, Methanobrevibacter gottschalkii; identical to SEQ ID NO: 7437
  source 1..2097: mol_type = genomic DNA

SEQ ID NO: 75259 - DNA, 468 bp, Methanobrevibacter gottschalkii; identical to SEQ ID NO: 7469
  source 1..468: mol_type = genomic DNA

SEQ ID NO: 75260 - DNA, 999 bp, Methanobrevibacter gottschalkii; identical to SEQ ID NO: 7473
  source 1..999: mol_type = genomic DNA

SEQ ID NO: 75261 - DNA, 1488 bp, Methanobrevibacter gottschalkii; identical to SEQ ID NO: 7483
  source 1..1488: mol_type = genomic DNA

SEQ ID NO: 75262 - DNA, 2049 bp, Methanobrevibacter gottschalkii; identical to SEQ ID NO: 7534
  source 1..2049: mol_type = genomic DNA

SEQ ID NO: 75263 - DNA, 666 bp, Methanobrevibacter gottschalkii; identical to SEQ ID NO: 7540
  source 1..666: mol_type = genomic DNA

SEQ ID NO: 75264 - DNA, 288 bp, Methanobrevibacter gottschalkii; identical to SEQ ID NO: 7541
  source 1..288: mol_type = genomic DNA

SEQ ID NO: 75265 - DNA, 690 bp, Methanobrevibacter gottschalkii; identical to SEQ ID NO: 7542
  source 1..690: mol_type = genomic DNA

SEQ ID NO: 75266 - DNA, 540 bp, Methanobrevibacter gottschalkii; identical to SEQ ID NO: 7577
  source 1..540: mol_type = genomic DNA

SEQ ID NO: 75267 - DNA, 636 bp, Methanobrevibacter gottschalkii; identical to SEQ ID NO: 7626
  source 1..636: mol_type = genomic DNA

SEQ ID NO: 75268 - DNA, 1356 bp, Methanobrevibacter gottschalkii; identical to SEQ ID NO: 7627
  source 1..1356: mol_type = genomic DNA

SEQ ID NO: 75269 - DNA, 732 bp, Methanobrevibacter gottschalkii; identical to SEQ ID NO: 7673
  source 1..732: mol_type = genomic DNA

SEQ ID NO: 75270 - DNA, 1029 bp, Methanobrevibacter gottschalkii; identical to SEQ ID NO: 7674
  source 1..1029: mol_type = genomic DNA

SEQ ID NO: 75271 - DNA, 630 bp, Methanobrevibacter gottschalkii; identical to SEQ ID NO: 7699
  source 1..630: mol_type = genomic DNA

SEQ ID NO: 75272 - DNA, 1014 bp, Methanobrevibacter gottschalkii; identical to SEQ ID NO: 7705
  source 1..1014: mol_type = genomic DNA

SEQ ID NO: 75273 - DNA, 1092 bp, Methanobrevibacter gottschalkii; identical to SEQ ID NO: 7729
  source 1..1092: mol_type = genomic DNA

SEQ ID NO: 75274 - DNA, 1071 bp, Methanobrevibacter gottschalkii; identical to SEQ ID NO: 7741
  source 1..1071: mol_type = genomic DNA

SEQ ID NO: 75275 - DNA, 1698 bp, Methanobrevibacter gottschalkii; identical to SEQ ID NO: 7750
  source 1..1698: mol_type = genomic DNA

SEQ ID NO: 75276 - DNA, 1386 bp, Methanobrevibacter gottschalkii; identical to SEQ ID NO: 7755
  source 1..1386: mol_type = genomic DNA

SEQ ID NO: 75277 - DNA, 534 bp, Methanobrevibacter gottschalkii; identical to SEQ ID NO: 7767
  source 1..534: mol_type = genomic DNA

SEQ ID NO: 75278 - DNA, 1926 bp, Methanobrevibacter gottschalkii; identical to SEQ ID NO: 7768
  source 1..1926: mol_type = genomic DNA

SEQ ID NO: 75279 - DNA, 519 bp, Methanobrevibacter gottschalkii; identical to SEQ ID NO: 7785
  source 1..519: mol_type = genomic DNA

SEQ ID NO: 75280 - DNA, 2430 bp, Methanobrevibacter gottschalkii; identical to SEQ ID NO: 7788
  source 1..2430: mol_type = genomic DNA

SEQ ID NO: 75281 - DNA, 939 bp, Methanobrevibacter gottschalkii; identical to SEQ ID NO: 7847
  source 1..939: mol_type = genomic DNA

SEQ ID NO: 75282 - DNA, 1869 bp, Methanobrevibacter gottschalkii; identical to SEQ ID NO: 7852
  source 1..1869: mol_type = genomic DNA

SEQ ID NO: 75283 - DNA, 1068 bp, Methanobrevibacter gottschalkii; identical to SEQ ID NO: 7857
  source 1..1068: mol_type = genomic DNA

SEQ ID NO: 75284 - DNA, 933 bp, Methanobrevibacter gottschalkii; identical to SEQ ID NO: 7894
  source 1..933: mol_type = genomic DNA

SEQ ID NO: 75285 - DNA, 207 bp, Methanobrevibacter gottschalkii; identical to SEQ ID NO: 7896
  source 1..207: mol_type = genomic DNA

SEQ ID NO: 75286 - DNA, 717 bp, Methanobrevibacter gottschalkii; identical to SEQ ID NO: 7897
  source 1..717: mol_type = genomic DNA

SEQ ID NO: 75287 - DNA, 816 bp, Methanobrevibacter gottschalkii; identical to SEQ ID NO: 7899
  source 1..816: mol_type = genomic DNA

SEQ ID NO: 75288 - DNA, 702 bp, Methanobrevibacter gottschalkii; identical to SEQ ID NO: 7900
  source 1..702: mol_type = genomic DNA

SEQ ID NO: 75289 - DNA, 1332 bp, Methanobrevibacter gottschalkii; identical to SEQ ID NO: 7906
  source 1..1332: mol_type = genomic DNA

SEQ ID NO: 75290 - DNA, 1173 bp, Methanobrevibacter gottschalkii; identical to SEQ ID NO: 7911
  source 1..1173: mol_type = genomic DNA

SEQ ID NO: 75291 - DNA, 1320 bp, Methanobrevibacter gottschalkii; identical to SEQ ID NO: 7913
  source 1..1320: mol_type = genomic DNA

SEQ ID NO: 75292 - DNA, 1023 bp, Methanobrevibacter gottschalkii; identical to SEQ ID NO: 7930
  source 1..1023: mol_type = genomic DNA

SEQ ID NO: 75293 - DNA, 1479 bp, Methanobrevibacter gottschalkii; identical to SEQ ID NO: 7944
  source 1..1479: mol_type = genomic DNA

SEQ ID NO: 75294 - DNA, 1455 bp, Methanobrevibacter gottschalkii; identical to SEQ ID NO: 7958
  source 1..1455: mol_type = genomic DNA

SEQ ID NO: 75295 - DNA, 387 bp, Methanobrevibacter gottschalkii; identical to SEQ ID NO: 7959
  source 1..387: mol_type = genomic DNA

SEQ ID NO: 75296 - DNA, 1425 bp, Methanobrevibacter gottschalkii; identical to SEQ ID NO: 7984
  source 1..1425: mol_type = genomic DNA

SEQ ID NO: 75297 - DNA, 570 bp, Methanobrevibacter gottschalkii; identical to SEQ ID NO: 8004
  source 1..570: mol_type = genomic DNA

SEQ ID NO: 75298 - DNA, 1215 bp, Methanobrevibacter gottschalkii; identical to SEQ ID NO: 8005
  source 1..1215: mol_type = genomic DNA

SEQ ID NO: 75299 - DNA, 2493 bp, Methanobrevibacter gottschalkii; identical to SEQ ID NO: 8026
  source 1..2493: mol_type = genomic DNA

SEQ ID NO: 75300 - DNA, 486 bp, Methanobrevibacter gottschalkii; identical to SEQ ID NO: 8036
  source 1..486: mol_type = genomic DNA

SEQ ID NO: 75301 - DNA, 852 bp, Methanobrevibacter gottschalkii; identical to SEQ ID NO: 8044
  source 1..852: mol_type = genomic DNA

SEQ ID NO: 75302 - DNA, 585 bp, Methanobrevibacter gottschalkii; identical to SEQ ID NO: 8078
  source 1..585: mol_type = genomic DNA

SEQ ID NO: 75303 - DNA, 1365 bp, Methanobrevibacter gottschalkii; identical to SEQ ID NO: 8105
  source 1..1365: mol_type = genomic DNA

SEQ ID NO: 75304 - DNA, 1644 bp, Methanobrevibacter gottschalkii; identical to SEQ ID NO: 8134
  source 1..1644: mol_type = genomic DNA

SEQ ID NO: 75305 - DNA, 1305 bp, Methanobrevibacter gottschalkii; identical to SEQ ID NO: 8135
  source 1..1305: mol_type = genomic DNA

SEQ ID NO: 75306 - DNA, 1698 bp, Methanobrevibacter gottschalkii; identical to SEQ ID NO: 8163
  source 1..1698: mol_type = genomic DNA

SEQ ID NO: 75307 - DNA, 1080 bp, Methanobrevibacter gottschalkii; identical to SEQ ID NO: 8180
  source 1..1080: mol_type = genomic DNA

SEQ ID NO: 75308 - DNA, 960 bp, Methanobrevibacter gottschalkii; identical to SEQ ID NO: 8182
  source 1..960: mol_type = genomic DNA

SEQ ID NO: 75309 - DNA, 1404 bp, Methanobrevibacter gottschalkii; identical to SEQ ID NO: 8184
  source 1..1404: mol_type = genomic DNA

SEQ ID NO: 75310 - DNA, 705 bp, Methanobrevibacter gottschalkii; identical to SEQ ID NO: 8201
  source 1..705: mol_type = genomic DNA

SEQ ID NO: 75311 - DNA, 804 bp, Methanobrevibacter gottschalkii; identical to SEQ ID NO: 8239
  source 1..804: mol_type = genomic DNA

SEQ ID NO: 75312 - DNA, 570 bp, Methanobrevibacter gottschalkii; identical to SEQ ID NO: 8247
  source 1..570: mol_type = genomic DNA

SEQ ID NO: 75313 - DNA, 942 bp, Methanobrevibacter gottschalkii; identical to SEQ ID NO: 8290
  source 1..942: mol_type = genomic DNA

SEQ ID NO: 75314 - DNA, 675 bp, Methanobrevibacter gottschalkii; identical to SEQ ID NO: 8299
  source 1..675: mol_type = genomic DNA

SEQ ID NO: 75315 - DNA, 1455 bp, Methanobrevibacter gottschalkii; identical to SEQ ID NO: 8312
  source 1..1455: mol_type = genomic DNA

SEQ ID NO: 75316 - DNA, 1887 bp, Methanobrevibacter gottschalkii; identical to SEQ ID NO: 8376
  source 1..1887: mol_type = genomic DNA

SEQ ID NO: 75317 - DNA, 570 bp, Methanobrevibacter gottschalkii; identical to SEQ ID NO: 8394
  source 1..570: mol_type = genomic DNA

SEQ ID NO: 75318 - DNA, 2019 bp, Methanobrevibacter gottschalkii; identical to SEQ ID NO: 8413
  source 1..2019: mol_type = genomic DNA

SEQ ID NO: 75319 - DNA, 639 bp, Methanobrevibacter gottschalkii; identical to SEQ ID NO: 8419
  source 1..639: mol_type = genomic DNA

SEQ ID NO: 75320 - DNA, 1365 bp, synthetic construct; identical to SEQ ID NO: 72365
  source 1..1365: mol_type = other DNA

SEQ ID NO: 75321 - DNA, 1071 bp, synthetic construct; identical to SEQ ID NO: 72370
  source 1..1071: mol_type = other DNA

SEQ ID NO: 75322 - DNA, 684 bp, synthetic construct; identical to SEQ ID NO: 72382
  source 1..684: mol_type = other DNA

SEQ ID NO: 75323 - DNA, 888 bp, synthetic construct; identical to SEQ ID NO: 72389
  source 1..888: mol_type = other DNA

SEQ ID NO: 75324 - DNA, 810 bp, synthetic construct; identical to SEQ ID NO: 72393
  source 1..810: mol_type = other DNA

SEQ ID NO: 75325 - DNA, 582 bp, synthetic construct; identical to SEQ ID NO: 72411
  source 1..582: mol_type = other DNA

SEQ ID NO: 75326 - DNA, 642 bp, synthetic construct; identical to SEQ ID NO: 72416
  source 1..642: mol_type = other DNA

SEQ ID NO: 75327 - DNA, 636 bp, synthetic construct; identical to SEQ ID NO: 72442
  source 1..636: mol_type = other DNA

SEQ ID NO: 75328 - DNA, 2130 bp, synthetic construct; identical to SEQ ID NO: 72463
  source 1..2130: mol_type = other DNA

SEQ ID NO: 75329 - DNA, 3939 bp, synthetic construct; identical to SEQ ID NO: 72488
  source 1..3939: mol_type = other DNA

SEQ ID NO: 75330 - DNA, 315 bp, synthetic construct; identical to SEQ ID NO: 72490
  source 1..315: mol_type = other DNA

SEQ ID NO: 75331 - DNA, 1806 bp, synthetic construct; identical to SEQ ID NO: 72501
  source 1..1806: mol_type = other DNA

SEQ ID NO: 75332 - DNA, 1707 bp, synthetic construct; identical to SEQ ID NO: 72502
  source 1..1707: mol_type = other DNA

SEQ ID NO: 75333 - DNA, 372 bp, synthetic construct; identical to SEQ ID NO: 72505
  source 1..372: mol_type = other DNA

SEQ ID NO: 75334 - DNA, 816 bp, synthetic construct; identical to SEQ ID NO: 72516
  source 1..816: mol_type = other DNA

SEQ ID NO: 75335 - DNA, 753 bp, synthetic construct; identical to SEQ ID NO: 72519
  source 1..753: mol_type = other DNA

SEQ ID NO: 75336 - DNA, 714 bp, synthetic construct; identical to SEQ ID NO: 72522
  source 1..714: mol_type = other DNA

SEQ ID NO: 75337 - DNA, 3657 bp, synthetic construct; identical to SEQ ID NO: 72525
  source 1..3657: mol_type = other DNA

SEQ ID NO: 75338 - DNA, 1650 bp, synthetic construct; identical to SEQ ID NO: 72537
  source 1..1650: mol_type = other DNA

SEQ ID NO: 75339 - DNA, 2664 bp, synthetic construct; identical to SEQ ID NO: 72554
  source 1..2664: mol_type = other DNA

SEQ ID NO: 75340 - DNA, 549 bp, synthetic construct; identical to SEQ ID NO: 72556
  source 1..549: mol_type = other DNA

SEQ ID NO: 75341 - DNA, 1791 bp, synthetic construct; identical to SEQ ID NO: 72579
  source 1..1791: mol_type = other DNA

SEQ ID NO: 75342 - DNA, 1746 bp, synthetic construct; identical to SEQ ID NO: 72580
  source 1..1746: mol_type = other DNA

SEQ ID NO: 75343 - DNA, 582 bp, synthetic construct; identical to SEQ ID NO: 72581
  source 1..582: mol_type = other DNA

SEQ ID NO: 75344 - DNA, 1434 bp, synthetic construct; identical to SEQ ID NO: 72583
  source 1..1434: mol_type = other DNA

SEQ ID NO: 75345 - DNA, 2355 bp, synthetic construct; identical to SEQ ID NO: 72588
  source 1..2355: mol_type = other DNA

SEQ ID NO: 75346 - DNA, 1371 bp, synthetic construct; identical to SEQ ID NO: 72589
  source 1..1371: mol_type = other DNA

SEQ ID NO: 75347 - DNA, 1620 bp, synthetic construct; identical to SEQ ID NO: 72595
  source 1..1620: mol_type = other DNA

SEQ ID NO: 75348 - DNA, 1278 bp, synthetic construct; identical to SEQ ID NO: 72606
  source 1..1278: mol_type = other DNA

SEQ ID NO: 75349 - DNA, 741 bp, synthetic construct; identical to SEQ ID NO: 72609
  source 1..741: mol_type = other DNA

SEQ ID NO: 75350 - DNA, 387 bp, synthetic construct; identical to SEQ ID NO: 72615
  source 1..387: mol_type = other DNA

SEQ ID NO: 75351 - DNA, 909 bp, synthetic construct; identical to SEQ ID NO: 72616
  source 1..909: mol_type = other DNA

SEQ ID NO: 75352 - DNA, 558 bp, synthetic construct; identical to SEQ ID NO: 72628
  source 1..558: mol_type = other DNA

SEQ ID NO: 75353 - DNA, 423 bp, synthetic construct; identical to SEQ ID NO: 72629
  source 1..423: mol_type = other DNA

SEQ ID NO: 75354 - DNA, 1656 bp, synthetic construct; identical to SEQ ID NO: 72631
  source 1..1656: mol_type = other DNA

SEQ ID NO: 75355 - DNA, 1332 bp, synthetic construct; identical to SEQ ID NO: 72632
  source 1..1332: mol_type = other DNA

SEQ ID NO: 75356 - DNA, 939 bp, synthetic construct; identical to SEQ ID NO: 72638
  source 1..939: mol_type = other DNA

SEQ ID NO: 75357 - DNA, 2097 bp, synthetic construct; identical to SEQ ID NO: 72640
  source 1..2097: mol_type = other DNA

SEQ ID NO: 75358 - DNA, 468 bp, synthetic construct; identical to SEQ ID NO: 72648
  source 1..468: mol_type = other DNA

SEQ ID NO: 75359 - DNA, 999 bp, synthetic construct; identical to SEQ ID NO: 72651
  source 1..999: mol_type = other DNA

SEQ ID NO: 75360 - DNA, 1488 bp, synthetic construct; identical to SEQ ID NO: 72655
  source 1..1488: mol_type = other DNA

SEQ ID NO: 75361 - DNA, 2049 bp, synthetic construct; identical to SEQ ID NO: 72671
  source 1..2049: mol_type = other DNA

SEQ ID NO: 75362 - DNA, 666 bp, synthetic construct; identical to SEQ ID NO: 72674
  source 1..666: mol_type = other DNA

SEQ ID NO: 75363 - DNA, 288 bp, synthetic construct; identical to SEQ ID NO: 72675
  source 1..288: mol_type = other DNA

SEQ ID NO: 75364 - DNA, 690 bp, synthetic construct; identical to SEQ ID NO: 72676
  source 1..690: mol_type = other DNA

SEQ ID NO: 75365 - DNA, 540 bp, synthetic construct; identical to SEQ ID NO: 72686
  source 1..540: mol_type = other DNA

SEQ ID NO: 75366 - DNA, 636 bp, synthetic construct; identical to SEQ ID NO: 72706
  source 1..636: mol_type = other DNA

SEQ ID NO: 75367 - DNA, 1356 bp, synthetic construct; identical to SEQ ID NO: 72707
  source 1..1356: mol_type = other DNA

SEQ ID NO: 75368 - DNA, 732 bp, synthetic construct; identical to SEQ ID NO: 72725
  source 1..732: mol_type = other DNA

SEQ ID NO: 75369 - DNA, 1029 bp, synthetic construct; identical to SEQ ID NO: 72726
  source 1..1029: mol_type = other DNA

SEQ ID NO: 75370 - DNA, 630 bp, synthetic construct; identical to SEQ ID NO: 72732
  source 1..630: mol_type = other DNA

SEQ ID NO: 75371 - DNA, 1014 bp, synthetic construct; identical to SEQ ID NO: 72734
  source 1..1014: mol_type = other DNA

SEQ ID NO: 75372 - DNA, 1092 bp, synthetic construct; identical to SEQ ID NO: 72743
  source 1..1092: mol_type = other DNA

SEQ ID NO: 75373 - DNA, 1071 bp, synthetic construct; identical to SEQ ID NO: 72747
  source 1..1071: mol_type = other DNA

SEQ ID NO: 75374 - DNA, 1698 bp, synthetic construct; identical to SEQ ID NO: 72753
  source 1..1698: mol_type = other DNA

SEQ ID NO: 75375 - DNA, 1386 bp, synthetic construct; identical to SEQ ID NO: 72755
  source 1..1386: mol_type = other DNA

SEQ ID NO: 75376 - DNA, 534 bp, synthetic construct; identical to SEQ ID NO: 72762
  source 1..534: mol_type = other DNA

SEQ ID NO: 75377 - DNA, 1926 bp, synthetic construct; identical to SEQ ID NO: 72763
  source 1..1926: mol_type = other DNA

SEQ ID NO: 75378 - DNA, 519 bp, synthetic construct; identical to SEQ ID NO: 72766
  source 1..519: mol_type = other DNA

SEQ ID NO: 75379 - DNA, 2430 bp, synthetic construct; identical to SEQ ID NO: 72767
  source 1..2430: mol_type = other DNA

SEQ ID NO: 75380 - DNA, 939 bp, synthetic construct; identical to SEQ ID NO: 72777
  source 1..939: mol_type = other DNA

SEQ ID NO: 75381 - DNA, 1869 bp, synthetic construct; identical to SEQ ID NO: 72779
  source 1..1869: mol_type = other DNA

SEQ ID NO: 75382 - DNA, 1068 bp, synthetic construct; identical to SEQ ID NO: 72780
  source 1..1068: mol_type = other DNA

SEQ ID NO: 75383 - DNA, 933 bp, synthetic construct; identical to SEQ ID NO: 72792
  source 1..933: mol_type = other DNA

SEQ ID NO: 75384 - DNA, 207 bp, synthetic construct; identical to SEQ ID NO: 72794
  source 1..207: mol_type = other DNA

SEQ ID NO: 75385 - DNA, 717 bp, synthetic construct; identical to SEQ ID NO: 72795
  source 1..717: mol_type = other DNA

SEQ ID NO: 75386 - DNA, 816 bp, synthetic construct; identical to SEQ ID NO: 72797
  source 1..816: mol_type = other DNA

SEQ ID NO: 75387 - DNA, 702 bp, synthetic construct; identical to SEQ ID NO: 72798
  source 1..702: mol_type = other DNA

SEQ ID NO: 75388 - DNA, 1332 bp, synthetic construct; identical to SEQ ID NO: 72800
  source 1..1332: mol_type = other DNA

SEQ ID NO: 75389 - DNA, 1173 bp, synthetic construct; identical to SEQ ID NO: 72801
  source 1..1173: mol_type = other DNA

SEQ ID NO: 75390 - DNA, 1320 bp, synthetic construct; identical to SEQ ID NO: 72802
  source 1..1320: mol_type = other DNA

SEQ ID NO: 75391 - DNA, 1023 bp, synthetic construct; identical to SEQ ID NO: 72806
  source 1..1023: mol_type = other DNA

SEQ ID NO: 75392 - DNA, 1479 bp, synthetic construct; identical to SEQ ID NO: 72810
  source 1..1479: mol_type = other DNA

SEQ ID NO: 75393 - DNA, 1455 bp, synthetic construct; identical to SEQ ID NO: 72818
  source 1..1455: mol_type = other DNA

SEQ ID NO: 75394 - DNA, 387 bp, synthetic construct; identical to SEQ ID NO: 72819
  source 1..387: mol_type = other DNA

SEQ ID NO: 75395 - DNA, 1425 bp, synthetic construct; identical to SEQ ID NO: 72832
  source 1..1425: mol_type = other DNA

SEQ ID NO: 75396 - DNA, 570 bp, synthetic construct; identical to SEQ ID NO: 72840
  source 1..570: mol_type = other DNA

SEQ ID NO: 75397 - DNA, 1215 bp, synthetic construct; identical to SEQ ID NO: 72841
  source 1..1215: mol_type = other DNA

SEQ ID NO: 75398 - DNA, 2493 bp, synthetic construct; identical to SEQ ID NO: 72845
  source 1..2493: mol_type = other DNA

SEQ ID NO: 75399 - DNA, 486 bp, synthetic construct; identical to SEQ ID NO: 72848
  source 1..486: mol_type = other DNA

SEQ ID NO: 75400 - DNA, 852 bp, synthetic construct; identical to SEQ ID NO: 72853
  source 1..852: mol_type = other DNA

SEQ ID NO: 75401 - DNA, 585 bp, synthetic construct; identical to SEQ ID NO: 72861
  source 1..585: mol_type = other DNA

SEQ ID NO: 75402 - DNA, 1365 bp, synthetic construct; identical to SEQ ID NO: 72873
  source 1..1365: mol_type = other DNA

SEQ ID NO: 75403 - DNA, 1644 bp, synthetic construct; identical to SEQ ID NO: 72883
  source 1..1644: mol_type = other DNA

SEQ ID NO: 75404 - DNA, 1305 bp, synthetic construct; identical to SEQ ID NO: 72884
  source 1..1305: mol_type = other DNA

SEQ ID NO: 75405 - DNA, 1698 bp, synthetic construct; identical to SEQ ID NO: 72894
  source 1..1698: mol_type = other DNA

SEQ ID NO: 75406 - DNA, 1080 bp, synthetic construct; identical to SEQ ID NO: 72902
  source 1..1080: mol_type = other DNA

SEQ ID NO: 75407 - DNA, 960 bp, synthetic construct; identical to SEQ ID NO: 72904
  source 1..960: mol_type = other DNA

SEQ ID NO: 75408 - DNA, 1404 bp, synthetic construct; identical to SEQ ID NO: 72906
  source 1..1404: mol_type = other DNA

SEQ ID NO: 75409 - DNA, 705 bp, synthetic construct; identical to SEQ ID NO: 72909
  source 1..705: mol_type = other DNA

SEQ ID NO: 75410 - DNA, 804 bp, synthetic construct; identical to SEQ ID NO: 72915
  source 1..804: mol_type = other DNA

SEQ ID NO: 75411 - DNA, 570 bp, synthetic construct; identical to SEQ ID NO: 72918
  source 1..570: mol_type = other DNA

SEQ ID NO: 75412 - DNA, 942 bp, synthetic construct; identical to SEQ ID NO: 72925
  source 1..942: mol_type = other DNA

SEQ ID NO: 75413 - DNA, 675 bp, synthetic construct; identical to SEQ ID NO: 72926
  source 1..675: mol_type = other DNA

SEQ ID NO: 75414 - DNA, 1455 bp, synthetic construct; identical to SEQ ID NO: 72934
  source 1..1455: mol_type = other DNA

SEQ ID NO: 75415 - DNA, 1887 bp, synthetic construct; identical to SEQ ID NO: 72953
  source 1..1887: mol_type = other DNA

SEQ ID NO: 75416 - DNA, 570 bp, synthetic construct; identical to SEQ ID NO: 72959
  source 1..570: mol_type = other DNA

SEQ ID NO: 75417 - DNA, 2019 bp, synthetic construct; identical to SEQ ID NO: 72968
  source 1..2019: mol_type = other DNA

SEQ ID NO: 75418 - DNA, 639 bp, synthetic construct; identical to SEQ ID NO: 72972
  source 1..639: mol_type = other DNA

SEQ ID NO: 75419 - DNA, 1365 bp, synthetic construct; identical to SEQ ID NO: 73002
  source 1..1365: mol_type = other DNA

SEQ ID NO: 75420 - DNA, 1071 bp, synthetic construct; identical to SEQ ID NO: 73007
  source 1..1071: mol_type = other DNA

SEQ ID NO: 75421 - DNA, 684 bp, synthetic construct; identical to SEQ ID NO: 73019
  source 1..684: mol_type = other DNA

SEQ ID NO: 75422 - DNA, 888 bp, synthetic construct; identical to SEQ ID NO: 73026
  source 1..888: mol_type = other DNA

SEQ ID NO: 75423 - DNA, 810 bp, synthetic construct; identical to SEQ ID NO: 73030
  source 1..810: mol_type = other DNA

SEQ ID NO: 75424 - DNA, 582 bp, synthetic construct; identical to SEQ ID NO: 73048
  source 1..582: mol_type = other DNA

SEQ ID NO: 75425 - DNA, 642 bp, synthetic construct; identical to SEQ ID NO: 73053
  source 1..642: mol_type = other DNA

SEQ ID NO: 75426 - DNA, 636 bp, synthetic construct; identical to SEQ ID NO: 73079
  source 1..636: mol_type = other DNA

SEQ ID NO: 75427 - DNA, 2130 bp, synthetic construct; identical to SEQ ID NO: 73100
  source 1..2130: mol_type = other DNA

SEQ ID NO: 75428 - DNA, 3939 bp, synthetic construct; identical to SEQ ID NO: 73125
  source 1..3939: mol_type = other DNA

SEQ ID NO: 75429 - DNA, 315 bp, synthetic construct; identical to SEQ ID NO: 73127
  source 1..315: mol_type = other DNA

SEQ ID NO: 75430 - DNA, 1806 bp, synthetic construct; identical to SEQ ID NO: 73138
  source 1..1806: mol_type = other DNA

SEQ ID NO: 75431 - DNA, 1707 bp, synthetic construct; identical to SEQ ID NO: 73139
  source 1..1707: mol_type = other DNA

SEQ ID NO: 75432 - DNA, 372 bp, synthetic construct; identical to SEQ ID NO: 73142
  source 1..372: mol_type = other DNA

SEQ ID NO: 75433 - DNA, 816 bp, synthetic construct; identical to SEQ ID NO: 73153
  source 1..816: mol_type = other DNA

SEQ ID NO: 75434 - DNA, 753 bp, synthetic construct; identical to SEQ ID NO: 73156
  source 1..753: mol_type = other DNA

SEQ ID NO: 75435 - DNA, 714 bp, synthetic construct; identical to SEQ ID NO: 73159
  source 1..714: mol_type = other DNA

SEQ ID NO: 75436 - DNA, 3657 bp, synthetic construct; identical to SEQ ID NO: 73162
  source 1..3657: mol_type = other DNA

SEQ ID NO: 75437 - DNA, 1650 bp, synthetic construct; identical to SEQ ID NO: 73174
  source 1..1650: mol_type = other DNA

SEQ ID NO: 75438 - DNA, 2664 bp, synthetic construct; identical to SEQ ID NO: 73191
  source 1..2664: mol_type = other DNA

SEQ ID NO: 75439 - DNA, 549 bp, synthetic construct; identical to SEQ ID NO: 73193
  source 1..549: mol_type = other DNA

SEQ ID NO: 75440 - DNA, 1791 bp, synthetic construct; identical to SEQ ID NO: 73216
  source 1..1791: mol_type = other DNA

SEQ ID NO: 75441 - DNA, 1746 bp, synthetic construct; identical to SEQ ID NO: 73217
  source 1..1746: mol_type = other DNA

SEQ ID NO: 75442 - DNA, 582 bp, synthetic construct; identical to SEQ ID NO: 73218
  source 1..582: mol_type = other DNA

SEQ ID NO: 75443 - DNA, 1434 bp, synthetic construct; identical to SEQ ID NO: 73220
  source 1..1434: mol_type = other DNA

SEQ ID NO: 75444 - DNA, 2355 bp, synthetic construct; identical to SEQ ID NO: 73225
  source 1..2355: mol_type = other DNA

SEQ ID NO: 75445 - DNA, 1371 bp, synthetic construct; identical to SEQ ID NO: 73226
  source 1..1371: mol_type = other DNA

SEQ ID NO: 75446 - DNA, 1620 bp, synthetic construct; identical to SEQ ID NO: 73232
  source 1..1620: mol_type = other DNA

SEQ ID NO: 75447 - DNA, 1278 bp, synthetic construct; identical to SEQ ID NO: 73243
  source 1..1278: mol_type = other DNA

SEQ ID NO: 75448 - DNA, 741 bp, synthetic construct; identical to SEQ ID NO: 73246
  source 1..741: mol_type = other DNA

SEQ ID NO: 75449 - DNA, 387 bp, synthetic construct; identical to SEQ ID NO: 73252
  source 1..387: mol_type = other DNA

SEQ ID NO: 75450 - DNA, 909 bp, synthetic construct; identical to SEQ ID NO: 73253
  source 1..909: mol_type = other DNA

SEQ ID NO: 75451 - DNA, 558 bp, synthetic construct; identical to SEQ ID NO: 73265
  source 1..558: mol_type = other DNA

SEQ ID NO: 75452 - DNA, 423 bp, synthetic construct; identical to SEQ ID NO: 73266
  source 1..423: mol_type = other DNA

SEQ ID NO: 75453 - DNA, 1656 bp, synthetic construct; identical to SEQ ID NO: 73268
  source 1..1656: mol_type = other DNA

SEQ ID NO: 75454 - DNA, 1332 bp, synthetic construct; identical to SEQ ID NO: 73269
  source 1..1332: mol_type = other DNA

SEQ ID NO: 75455 - DNA, 939 bp, synthetic construct; identical to SEQ ID NO: 73275
  source 1..939: mol_type = other DNA

SEQ ID NO: 75456 - DNA, 2097 bp, synthetic construct; identical to SEQ ID NO: 73277
  source 1..2097: mol_type = other DNA

SEQ ID NO: 75457 - DNA, 468 bp, synthetic construct; identical to SEQ ID NO: 73285
  source 1..468: mol_type = other DNA

SEQ ID NO: 75458 - DNA, 999 bp, synthetic construct; identical to SEQ ID NO: 73288
  source 1..999: mol_type = other DNA

SEQ ID NO: 75459 - DNA, 1488 bp, synthetic construct; identical to SEQ ID NO: 73292
  source 1..1488: mol_type = other DNA

SEQ ID NO: 75460 - DNA, 2049 bp, synthetic construct; identical to SEQ ID NO: 73308
  source 1..2049: mol_type = other DNA

SEQ ID NO: 75461 - DNA, 666 bp, synthetic construct; identical to SEQ ID NO: 73311
  source 1..666: mol_type = other DNA

SEQ ID NO: 75462 - DNA, 288 bp, synthetic construct; identical to SEQ ID NO: 73312
  source 1..288: mol_type = other DNA

SEQ ID NO: 75463 - DNA, 690 bp, synthetic construct; identical to SEQ ID NO: 73313
  source 1..690: mol_type = other DNA

SEQ ID NO: 75464 - DNA, 540 bp, synthetic construct; identical to SEQ ID NO: 73323
  source 1..540: mol_type = other DNA

SEQ ID NO: 75465 - DNA, 636 bp, synthetic construct; identical to SEQ ID NO: 73343
  source 1..636: mol_type = other DNA

SEQ ID NO: 75466 - DNA, 1356 bp, synthetic construct; identical to SEQ ID NO: 73344
  source 1..1356: mol_type = other DNA

SEQ ID NO: 75467 - DNA, 732 bp, synthetic construct; identical to SEQ ID NO: 73362
  source 1..732: mol_type = other DNA

SEQ ID NO: 75468 - DNA, 1029 bp, synthetic construct; identical to SEQ ID NO: 73363
  source 1..1029: mol_type = other DNA

SEQ ID NO: 75469 - DNA, 630 bp, synthetic construct; identical to SEQ ID NO: 73369
  source 1..630: mol_type = other DNA

SEQ ID NO: 75470 - DNA, 1014 bp, synthetic construct; identical to SEQ ID NO: 73371
  source 1..1014: mol_type = other DNA

SEQ ID NO: 75471 - DNA, 1092 bp, synthetic construct; identical to SEQ ID NO: 73380
  source 1..1092: mol_type = other DNA

SEQ ID NO: 75472 - DNA, 1071 bp, synthetic construct; identical to SEQ ID NO: 73384
  source 1..1071: mol_type = other DNA

SEQ ID NO: 75473 - DNA, 1698 bp, synthetic construct; identical to SEQ ID NO: 73390
  source 1..1698: mol_type = other DNA

SEQ ID NO: 75474 - DNA, 1386 bp, synthetic construct; identical to SEQ ID NO: 73392
  source 1..1386: mol_type = other DNA

SEQ ID NO: 75475 - DNA, 534 bp, synthetic construct; identical to SEQ ID NO: 73399
  source 1..534: mol_type = other DNA

SEQ ID NO: 75476 - DNA, 1926 bp, synthetic construct; identical to SEQ ID NO: 73400
  source 1..1926: mol_type = other DNA

SEQ ID NO: 75477 - DNA, 519 bp, synthetic construct; identical to SEQ ID NO: 73403
  source 1..519: mol_type = other DNA

SEQ ID NO: 75478 - DNA, 2430 bp, synthetic construct; identical to SEQ ID NO: 73404
  source 1..2430: mol_type = other DNA

SEQ ID NO: 75479 - DNA, 939 bp, synthetic construct; identical to SEQ ID NO: 73414
  source 1..939: mol_type = other DNA

SEQ ID NO: 75480 - DNA, 1869 bp, synthetic construct; identical to SEQ ID NO: 73416
  source 1..1869: mol_type = other DNA

SEQ ID NO: 75481 - DNA, 1068 bp, synthetic construct; identical to SEQ ID NO: 73417
  source 1..1068: mol_type = other DNA

SEQ ID NO: 75482 - DNA, 933 bp, synthetic construct; identical to SEQ ID NO: 73429
  source 1..933: mol_type = other DNA

SEQ ID NO: 75483 - DNA, 207 bp, synthetic construct; identical to SEQ ID NO: 73431
  source 1..207: mol_type = other DNA

SEQ ID NO: 75484 - DNA, 717 bp, synthetic construct; identical to SEQ ID NO: 73432
  source 1..717: mol_type = other DNA

SEQ ID NO: 75485 - DNA, 816 bp, synthetic construct; identical to SEQ ID NO: 73434
  source 1..816: mol_type = other DNA

SEQ ID NO: 75486 - DNA, 702 bp, synthetic construct; identical to SEQ ID NO: 73435
  source 1..702: mol_type = other DNA

SEQ ID NO: 75487 - DNA, 1332 bp, synthetic construct; identical to SEQ ID NO: 73437
  source 1..1332: mol_type = other DNA

SEQ ID NO: 75488 - DNA, 1173 bp, synthetic construct; identical to SEQ ID NO: 73438
  source 1..1173: mol_type = other DNA

SEQ ID NO: 75489 - DNA, 1320 bp, synthetic construct; identical to SEQ ID NO: 73439
  source 1..1320: mol_type = other DNA

SEQ ID NO: 75490 - DNA, 1023 bp, synthetic construct; identical to SEQ ID NO: 73443
  source 1..1023: mol_type = other DNA

SEQ ID NO: 75491 - DNA, 1479 bp, synthetic construct; identical to SEQ ID NO: 73447
  source 1..1479: mol_type = other DNA

SEQ ID NO: 75492 - DNA, 1455 bp, synthetic construct; identical to SEQ ID NO: 73455
  source 1..1455: mol_type = other DNA

SEQ ID NO: 75493 - DNA, 387 bp, synthetic construct; identical to SEQ ID NO: 73456
  source 1..387: mol_type = other DNA

SEQ ID NO: 75494 - DNA, 1425 bp, synthetic construct; identical to SEQ ID NO: 73469
  source 1..1425: mol_type = other DNA

SEQ ID NO: 75495 - DNA, 570 bp, synthetic construct; identical to SEQ ID NO: 73477
  source 1..570: mol_type = other DNA

SEQ ID NO: 75496 - DNA, 1215 bp, synthetic construct; identical to SEQ ID NO: 73478
  source 1..1215: mol_type = other DNA

SEQ ID NO: 75497 - DNA, 2493 bp, synthetic construct; identical to SEQ ID NO: 73482
  source 1..2493: mol_type = other DNA

SEQ ID NO: 75498 - DNA, 486 bp, synthetic construct; identical to SEQ ID NO: 73485
  source 1..486: mol_type = other DNA

SEQ ID NO: 75499 - DNA, 852 bp, synthetic construct; identical to SEQ ID NO: 73490
  source 1..852: mol_type = other DNA

SEQ ID NO: 75500 - DNA, 585 bp, synthetic construct; identical to SEQ ID NO: 73498
  source 1..585: mol_type = other DNA

SEQ ID NO: 75501 - DNA, 1365 bp, synthetic construct; identical to SEQ ID NO: 73510
  source 1..1365: mol_type = other DNA

SEQ ID NO: 75502 - DNA, 1644 bp, synthetic construct; identical to SEQ ID NO: 73520
  source 1..1644: mol_type = other DNA

SEQ ID NO: 75503 - DNA, 1305 bp, synthetic construct; identical to SEQ ID NO: 73521
  source 1..1305: mol_type = other DNA

SEQ ID NO: 75504 - DNA, 1698 bp, synthetic construct; identical to SEQ ID NO: 73531
  source 1..1698: mol_type = other DNA

SEQ ID NO: 75505 - DNA, 1080 bp, synthetic construct; identical to SEQ ID NO: 73539
  source 1..1080: mol_type = other DNA

SEQ ID NO: 75506 - DNA, 960 bp, synthetic construct; identical to SEQ ID NO: 73541
  source 1..960: mol_type = other DNA

SEQ ID NO: 75507 - DNA, 1404 bp, synthetic construct; identical to SEQ ID NO: 73543
  source 1..1404: mol_type = other DNA

SEQ ID NO: 75508 - DNA, 705 bp, synthetic construct; identical to SEQ ID NO: 73546
  source 1..705: mol_type = other DNA

SEQ ID NO: 75509 - DNA, 804 bp, synthetic construct; identical to SEQ ID NO: 73552
  source 1..804: mol_type = other DNA

SEQ ID NO: 75510 - DNA, 570 bp, synthetic construct; identical to SEQ ID NO: 73555
  source 1..570: mol_type = other DNA

SEQ ID NO: 75511 - DNA, 942 bp, synthetic construct; identical to SEQ ID NO: 73562
  source 1..942: mol_type = other DNA

SEQ ID NO: 75512 - DNA, 675 bp, synthetic construct; identical to SEQ ID NO: 73563
  source 1..675: mol_type = other DNA

SEQ ID NO: 75513 - DNA, 1455 bp, synthetic construct; identical to SEQ ID NO: 73571
  source 1..1455: mol_type = other DNA

SEQ ID NO: 75514 - DNA, 1887 bp, synthetic construct; identical to SEQ ID NO: 73590
  source 1..1887: mol_type = other DNA

SEQ ID NO: 75515 - DNA, 570 bp, synthetic construct; identical to SEQ ID NO: 73596
  source 1..570: mol_type = other DNA

SEQ ID NO: 75516 - DNA, 2019 bp, synthetic construct; identical to SEQ ID NO: 73605
  source 1..2019: mol_type = other DNA

SEQ ID NO: 75517 - DNA, 639 bp, synthetic construct; identical to SEQ ID NO: 73609
  source 1..639: mol_type = other DNA

SEQ ID NO: 75518 - protein, 41 aa, Methanobrevibacter gottschalkii
LLGGIDIANTALTNMVNLYPANAIATGGTGWTAFPEFGTPF

SEQ ID NO: 75519 - protein, 34 aa, Methanobrevibacter gottschalkii; identical to SEQ ID NO: 56630

SEQ ID NO: 75520 - protein, 28 aa, Methanobrevibacter gottschalkii
KKTALGLGICKFVFGVETLLPVAPWPFI

SEQ ID NO: 75521 - protein, 342 aa, Methanobrevibacter gottschalkii
TPSSVETEGSKNITDMLNRTVEVPNGVNNVIATSPPMTTVLYMLSPEKLKAVNFQWTEDELKYVPSEYANLPVVGGWYGTQDGSYEEFIAAEPDIVIESIDEGGDGDAFTVQERQDKFGKIPVLAVKDTTNVEKIGDSISFMGEVIGTEDKANQLNEFNTKYLDIVHDKSSKLVDSNKKTVYYAASSDGLQTYPSGASHGQLIDLIGGKNVADSLNQGNTTSGVQVSIEQVIKLDPDVIITNDMHFYNKVYNDSSWAHLKAVKNKKVYVSPQSPFKWFDKPVGANMIIGVPWTAKVIYPEDYKDINMVDVTKEFYSNFYHFDLNDNQAKEILLDSGLKESNL

SEQ ID NO: 75522 - protein, 36 aa, Methanobrevibacter gottschalkii; identical to SEQ ID NO: 63780

SEQ ID NO: 75523 - protein, 24 aa, Methanobrevibacter gottschalkii
IADPDDKLPEIVYWLMGSLASITM

SEQ ID NO: 75524 - protein, 646 aa, Methanobrevibacter gottschalkii
QDISNSTDFTFQNSNFDYLEKTDSVNLISTSDKISTHIDVVSNTTFDGTVDYFKIKLSDENNKSVPNAKVIFTVNGVSYDKNTDSQGISSLQINLADGSYKVISKFVGDSNYKSSSKSTTITIDNTRIVEDGLNNAEIQNIIDDAKEGNVILFKGNSYSNINLVINKRLTLISTVNTVLKSSSSSPTITIKGKEASYSIVKGFKIQGNGDGVVVDGSNYVRILNNDITADGVGITAFNVKYINITGNNIVKNGKCGIILYSTEKSYIINNVINNNNANGIVLTKSDITYIDSNTISNNARYGILLTNKFNGNSYKNGPENVYITKNTINNNKWDGISVNNAEDNINIKGNTIVGNDESGISVNVVGSYKIQSNIITNSYTGVRFDEDHVQKKNQEITYNAIYGNAHVQIEAKSYNGVNPLSVGDNWYTDDGLLCPKIKTNNLKFTVTQIGKNQFQATFVDSNGNIASLLPDRELKYKTNDGKIATVMIKGGIGTFTVTASDADIIKSTVDRTSRKNVYDSNSPTKTPQNGQSPTYDYPNIDYGGGQGNGNGQGGNANNGNGSSQKSSDDSGNSSNSKKMEPNSNPVNQANDVSQSYDTSQSMARADASEISGGANSGSQSIAKQIIIEDDEFFIVKGLSLIVLLIL

SEQ ID NO: 75525 - protein, 458 aa, Methanobrevibacter gottschalkii
MSINDNLGDASSDLENEIINSKNGDIILIKPGTYNIHNITITNKTITLQGIGNPSDIIIDGGKQSSIFLINNITTCVTFKNLTFINGLSYNFGGAICINTGSVYIDNCQFINNTALNNTNAGAISNYGNEDNKAYLLVNNTLFMNNHADHDGGAVTTCYANSDMYNCVFINNTAVRDGGAVRVSVYGYGHVEDCIFMYNHADEWGGAYYSWSGTSKINRCIFMNNTAGTNGGAVMVSGNLDLENSIIVNNSGGKTGGSFYIQEPMYQAKTYINVNNNLITNNSSPKGQEIYVKWRHSQNLYPDFNDNDWGSEDPNDYKINDPDNVTARSKVKTTTDKSNLLDELNFNALNKYYDLIKDYFPENYLENIKKQAESKANQNKENNKNNTPNNKDEHGLKDSNNTKNSLNDSKIILSNKTTENIETENYLISSNSTTPIGDDEKAYELNETKSVSKSQSPR

SEQ ID NO: 75526 - protein, 947 aa, Methanobrevibacter gottschalkii
EDNNVTENATNEDFQAIQILIDNANPGDSIYLENKTYQGSGSPIIVNKSVNVYGVDSSKTILDASNKSSIFLISKDVKVNFNGLTLTNGYNETKGGAIYNLGILNITNSKISSNYAESGAIRNEGTGKLTISNSLFDKNCGSFGAAIDNYVGYLNIVDTTFTNNDCLEGGAIYNRFGEFLVYNCTFINNSAARGGGVYNNRGGMYIYNSRFIANNVYDLGGGIKSWGSCEVYNTVLINNTAKQGGGIYVSEFTLIAENCFVENNSAHWGGGIAVEAKATAKIKNATIINNLADRGAGIDINMGSIDLQDSIVNNNVAKYGAGGIYFALLSSTVKNTYICNNIANTSGGGCYIYGFRGVVVNFTNVIINNNSASKGGAIYSTGTANIQNSILNSNNAYKGGAIYNELNLTVKDSQFFENTADSWGGAIYNNLNSFIDNVVLNSNEVKQFGGAIYNEKLVNAKNSLFESNKALQAGAIYSTNDLIIDNSQFIKNYVKRNYCVLMLSKGDVNITNSLFKFNTNADEGGCIFNYNANLLIDASQFISNDARSYGAAIDNSGNLTIKNSLFYKNKAYGAAAIDNSGNLVIIKSNFTDNVATNNGGAIDSNGKLIIIGSIFKNNLAGNNGGALILRGDTTVTHSIIYNNHDKNGYAIFNKGVENISLSNNWWGSNNPDFEKLLNMGTSDDFNWIIMSFSSNNQLIQYKNSILNINFDNVKDKMGNVYKINSTELLPIFKIALSNYGEVTISNGFKSMNKNIPLITSISAKIDNQSIILKITPTNKRIIDNKNIVVDYNGKVTYKVRVVGVDGKIVGANVAVVMKIAGKKYTVKTNKNGFVSKLFSLTPGKYSIITTYKGFTVKNSITVKKVLYAKSITKKKSKKITYSVSLKISNGKPIAGKKITFKIKSKTYTAKTNKKGVAVVSFKNLKVGKYSVIVNYLNSKVKTTLKIK

SEQ ID NO: 75527 - protein, 1446 aa, Methanobrevibacter gottschalkii
SDDSNLTDDLSSFASDFDKSNLGQNIEVNLDKLSFSEDSPLSDTIIVEEVEKDHNEMDDSTIQKAINNAKAGDTIIINGTSYVHCHFIIDKKLTIISNVGTTMEPCGSDAVSGHRGIFYISPEASGTVISGFTIRNDVAKADDYGILVRGADDVKIQNCVIYNNGLSSDAIRVENTKNTVIENVSISKAFNGIRILDSENVNISDSFIDNAKYCINVIDSNKINLVSNNITNNKISGIAISGSSKNINILSNNISKGHVGINLTVANHVYIISNYIGLSDKYGVYTNCNITKMEIKGNFIDRNGNYNIFNDHRVKNLFVNGGENKQVINNNYMIGGDNQDRPVWHQVYEYRPGKGDNTYNPETDTYTYVGEDNGDYYGHQSGTFMGYVLAINQFLQCPNIYFTFPTNGVTPWTKTGNYNLYLSEITQVKKGVYSISIVDVDGNLAEEISSVPVTFYLMKNNTDNNGKQKAPQEDDVSKVVMMKNGTATVRFYPDEFKESDNILLASFPGIGNNIYSNMYSPYKLFSIDDKFIPGNVTETKVTVSNLNTYPNSNAIFKVILIDLTGNAIANELVNFKINGKSYGATTDVNGVAKIKISQSKEGTYTIAVNYIGDDIDYTSSSAQAKVAVKKISTKILSSNVYMIPNIAEYYSITLKDASGHGISYQKVTFKLNKKIYTVKTNKNGVAKLKLKFTKKTTYYIHVNFEGNSKYKAVSKTNKIIVKYSSKIAKLTVPKVTILPKTYKYYTISLKNTNGKGIAKQKITVKLNGKTYIKTTNGKGNVAIKVKFSKLGAYKVSAIYKGSKIYKKTSSNGKIVVAKSSTKFTAPKVTILPYEKKVYTTTLKTSAGKALSKQKITIVLNGKTYSKTTNSKGQASINVKFSSENVYSVILKYSGNGYYKSSKATGTITVSKISTQLISYNKTFAIDSTKNFTISLKDKSGKTLSNQNITFLFNNQNLTKITDENGIASVNLDANVGSFEIISKYCGNNQYKSISNTNMITISNKTNVVFVDASLPNSEIQKIFDDCKNGSNVEFLGNSYNDISLNINKPLNIYSENRITLNAKSMSPVFKVLASDVKICNLSIVGNSYDGIEINNAVNVVIFENNILNRLDQSKIGEYMLSTISLPGYGINVIDSKNVEISNNSINTFESGIFVSNSNNLSINSNVLKENNYGIKYGFNVSNSNITNNMISESIGLYTNLVPEGPRGYGVFLNNSAVNVTIAKNNISWNHLGISIDANYSTGILITSNLISDNVLEGIRFNEGYDLAKNAIEPVVTDNAIYRNGRGPSMMILGELSANPAGIYGPGAFNDSLKLKLGANWYGKNLIVTWDNDTGVVGYGTMCPRINTTGIAFKEITCVNPGTYSITFYKNDEVASKLPVFNMYATLNDNVEIVFDVINGVGVFTFDTQKFTTGENVIKVSSGSLNDSDRIFKVEMSKTLDDSEVPI

SEQ ID NO: 75528 - protein, 11 aa, Methanobrevibacter gottschalkii
NFPYTKWLYFA

SEQ ID NO: 75529 - protein, 59 aa, Methanobrevibacter gottschalkii
GVSLSFDNDDGPHWKNVTEEMTTNLNETDNFTYDEEVDGVDFNSNETLTELNVTVKPSY

SEQ ID NO: 75530 - protein, 244 aa, Methanobrevibacter gottschalkii
LTGSVGTSNGDLNGQDVQLAAAASLKNVYDEKLIPMFEEKYPGVKVTPTYASSGDLQKQIENGLKADVFMSAGNKQMDALINESYVDNDSNVKFLENKLVLIVSADSNVNVSSFEDLKNVNGTIAIGDPESVPAGQYANESLHNLGIWDDVESKLSLGTDVTAVLNQVAQGSADCGLVYTTDAKSSDEVKVICEAPEDSLKDIVYPVAPIKDSEHADAANKFMEFLQTPEAQSVFEDYGFTIHE

SEQ ID NO: 75531 - protein, 23 aa, Methanobrevibacter gottschalkii
FGVRGPIGSFLIDFFAVKIAFSW

SEQ ID NO: 75532 - protein, 27 aa, Methanobrevibacter gottschalkii
IAGNIAGQTRTLPMAVYSEVAAGNMGD

SEQ ID NO: 75533 - protein, 11 aa, Methanobrevibacter gottschalkii
VAGLGPTAIAG

SEQ ID NO: 75534 - protein, 19 aa, Methanobrevibacter gottschalkii
PLLVSYGASGQTLNEAIAY

SEQ ID NO: 75535 - protein, 11 aa, Methanobrevibacter gottschalkii
SQVGGDYGIAT

SEQ ID NO: 75536 - protein, 21 aa, Methanobrevibacter gottschalkii
PLSTLFAYTPETTNLVPGIAL

SEQ ID NO: 75537 - protein, 371 aa, Methanobrevibacter gottschalkii
QACWNPYENTNEVEFAIANLDNGSTFEGTYLNVGNEIVKDLKNNTKFDWKFVTEDELRKGVHDGDYYAGIIIPKNLSENIASITSDNPKQAELEYLVNIKSNPVATKLTDTGANTVYTTVNAKIVQIINLAAYGKLGDLKDGLSSGAGQLYSGGSQLSAGAAKISSGAGQVSSGVSDVQNGASQVQSGANQVQQGSSAINNGASDVKQGSASIKQSASDLEKGSQQIQSQVDPSTLPEPMKQYVEGNIKLANGSGELAKGSSQLADGSVKLADSSSKLANGASNVAGGANQVAGGSVELAKGSLSLAAGAQMLSGSASQALFSAAGALSSSANSLSSITGINETELGDYFYSPIKLDRQEVFSVPDYGSNV

SEQ ID NO: 75538 - protein, 43 aa, Methanobrevibacter gottschalkii
GTGGIYPIEIMQDFFQTLYPYLPMTYAITLIREAQLGVVWSNY

SEQ ID NO: 75539 - protein, 26 aa, Methanobrevibacter gottschalkii
FFNASLFNTYSFHTISELGIPNVNSP

SEQ ID NO: 75540 - protein, 12 aa, Methanobrevibacter gottschalkii
GIITAVGGFKLG

SEQ ID NO: 75541 - protein, 115 aa, Methanobrevibacter gottschalkii
ASSDEINDGIAISGVIIKGNDIVPVDTIRSNVMQAGFRDGSVIYGDILKTSKREVSLQDAIQTAQEFATRSTVPGTSVQPITAADVQVDKNTGVVTVTVIEDFSSVELDNKTSGG

SEQ ID NO: 75542 - protein, 366 aa, Methanobrevibacter gottschalkii
ATCNIIVITDPSGNDPNGAAAGSMSFADNMFQSTFLLSRSNHFAVLSGGTGSSDTRLDSIVDAVASLENNASAASAASLASQFKGARLVVGGPNIGAAVGGSFNAYVITVDDSSNDIKVTPYNSGVATLQPGQKGAIIHLRNTAGNPLYGTADSVRKETAMNIGKMIRDGYPATTILAEAMGEVAKDSGEKYGGGGVNLVSGISTSDMFTPKELNSTGYPMDEEYSKVCDSCGWAMGFPAAEAYEKCPVCGGDLRTVYAYQALGDALTVSSKAVSVSVYGSDRPGLAETTKEIVEASVSKYGYDASAISGSINRGINNGLLVGVDHVEPKDINVKQGSKAVGVYYKSLPSERSSPAWDLPIDGNIL

SEQ ID NO: 75543 - protein, 13 aa, Methanobrevibacter gottschalkii
QVYLISQIQLPLT

SEQ ID NO: 75544 - protein, 88 aa, Methanobrevibacter gottschalkii
MLQAKKTITVTVKSIPTSLTVNDLTCNYGEDNSYLYATLKDTKNNKFLNGQTITFKINDKIINVVSDNKGRAKIKIDEKPGLYNVIVS

SEQ ID NO: 75545 - protein, 144 aa, Methanobrevibacter gottschalkii
ASISKKINVNVISFNPTVNYDGGFYNKSYLNLSLNINNAKLIKYCLNNDSWSQSDKSVSFILTNGIYDLYYSNGSGSIFHEHYLIDNNCPVVWSNFGSDLYDSSIIVNLSSWDNLDANPKIYYSLDESNFKLYENLLNISRTTL

SEQ ID NO: 75546 - protein, 20 aa, Methanobrevibacter gottschalkii
KFYSIDFNGHKSETKTCNYI

SEQ ID NO: 75547 - protein, 211 aa, Methanobrevibacter gottschalkii
GRGFTTIQSAIDDSNTHNGDIIKISEGLYNEPLTVNKFVTMIGINATLTSRDPSRPVIGITGGGSNSVIYGFKIKDSEHGVVIYHADNVSVINNQFINVVKSIEIDDDKNTLVAYNSIDSDKFLNFMSGVAIRKSDNLMVFNNNISLNSDTGAGGIVVTNITSNNISIVNNRITNKNNLNGIGLYVICSNVSIDSNNVSNFNAGLYVVSSN

SEQ ID NO: 75548 - protein, 154 aa, Methanobrevibacter gottschalkii
NEFKNNNHGVFLRVSVNNTYAFNNIHDNILCGFVLDTSLLSYNDSCYLNRLCDNSQYDFYSEANSDYVINDNWWGENTPKISINRSILANIYNATGNVIMNSWMVAHLFSSSYKINENNNIERAKFYVDLTYNNIGNDLSYKGYIPNNLKSFIG

SEQ ID NO: 75549 - protein, 62 aa, Methanobrevibacter gottschalkii
VDFELNDLFKNHENITVMSIFDNVKILNSFNKKVTIDIMLFSSAWDFENNYFVNKTYQIPFS

SEQ ID NO: 75550 - protein, 398 aa, Methanobrevibacter gottschalkii
TFCWSETGLFTGKIYVIVNGEILDEINIHNLFYQKFKNNYSTNVFEAIKLLDTVFASTKEGVWAPNGYYFSFAKAANIDFRDYNSVYNRFLNYIKLYYDLTDSDLNFVKNYKGFFIDFIDMTIDFHGDMTPDINFDYNGVHKLLKPPSSYAHRISNIYYTDIEDENNISIGYEGMRSFAIVKDNLTNDDLQFWLNQKELYAPGLMKAAYGTFLTSLLVIYENDRVADESAIKFNVTWSRISPVCVSLCNDYNCLYVTGESDHGMGREAIGNISDVWKFNFATSFSFSLVEQLVGNNIWNDTTIGSVTLGLIESYFNNETMEIFTSNGYIFIKCENDGNTLLFLDLKTGIVRDYFSYYGLLGTMPCYHDNITENAWKYGNNLLNNMGREFNDLKNIFGI

SEQ ID NO: 75551 - protein, 104 aa, Methanobrevibacter gottschalkii
LPIIMFLFPEQVNEVWMNFASLFNPYYKDYPDIPIYENTYPANIINPPKLVLDGKSSDDYIISQLKNNRNFNNKYKRYNSNVNKDNINFKIKIGPIPSGKGPKD

SEQ ID NO: 75552 - protein, 60 aa, Methanobrevibacter gottschalkii
GKYLKELYKNYKDAKSKGEVLKFVKSNIKELFALSLYFESIETVNLLINLFLYEIEKDKG

SEQ ID NO: 75553 - protein, 242 aa, Methanobrevibacter gottschalkii
VSDNVVENDTLSVDCQVGELCSDTIEVSSDNYYIDNNVVNSSDINFTDVYSGNVVKKVKSTVKTSITAKDITKYFQDGTSVKAYLKNSNGKVLSGKKITVTYSGKTYSRTTDSKGCVSWDVKKGPGTYSVKFSFKASGYKSSSKTAKVTVKAMPTTLTANNLVFTYGDTNNKLKATLKNKKGKSIVNKTVVFNFSGKKYIKKTNSKGVACLTITAKPKTYPTAISFTNANYVTSKKNNNSNS

SEQ ID NO: 75554 - protein, 1378 aa, Methanobrevibacter gottschalkii
ADLNESDKLGSGVNVEDKLENSQKNKSMSDTNQNPALKAKTYSVNGGTFRDIQNAIDKSSAGDTIKLSGKFVSKGDDTISMSKKLTITSPSQAILDGKNSTTILKIFTGATQSKLSNLRFVNGYSDSKGGAIVISAKSIAFDKCVFENNYANLSSGAIHTPYRAIATQGMLIKNCNFTNNGAGIAAGALGIFGHDFLIENCAFSSNYVKGYGECYGGAIQIGLDTEPSYGNVRNCRFINNKAISSTGLGHAGAGCVRNGSSYYNCIFINNSADWGAALTYHASGNLNNCTLINNTATKYGGAVAIMMNYLNFMNLNITNSIFKGNKAPLGGAVKLDGLNIKIEESTFDDNYASEYGGAVNINATNVKIINSKFNRNIANIDGGAVFIKGKDTTVKNSKFISNEAIPDVKKLNDGLGGAIYVNSTKVLAQNNEFKLNTARNGSAIYFDRNGLEFKLVNNTLYQNQAWVYRLPIFAHDIYYGESENIKSVIYGGNNIADFDNLKVSNAIYNAASNNKIEIDGEHPVLGATTSGKLYQDDREYNVRVLMMVRHEDGTIVYNNSLNTNYLGAVSGKLDNLKPGKYYVTAKHFEDNYYKAIANTTVFNVLPKTDNKILKSSNGNSIAYKDTVIWTLNITNNGPNDSTGVVVYDVLPEGLIWVNDDSNGAYNPKTGVLTIGSLKVGETIVLNIMTKVNATGKIVNKANVTGNEYDINLDNNHDEKEINVPPTVDLAIIKKVNITTPNYGDSVIWTLTVSNSGPDVAHDVKVTDIFSDSLIWIEDDSLGKYNPKTGIWNIGTLNKGKTIELNIVSQVNQTGNITNNVSVTSREHDIDLSNNVANKTIFVIKSGDLSILKTVNVSDANYGEIVKWTLTAYNNGPNKVNGVTVQDILPKGLMLLNYTASKGFYDDGVWVVCCLEKGKTETLELICKVNRTGNITNIAKISGIEYDPNLDNNLDNESIIVPPASDISVIKQVDSKNPYFGDIITWIIEVTNKGPDRATNIRVTDELPEGLIFKDYVSTCGVYQNGVWFLDYLNAGDSEYLNISCHVGQLGIIVNDVSAIANEFDINLSDNHYNESINVLPVSDLSIEKFVNVSNANYKDLIKWTLIVSNNGFNDATDVVVEDILPDSLEFISANGDYEEGIWYVGDLGVGNSKTLDIVTRIIKTGDITNVAAVYCSEDDPDLSNNEAEDTVHVGPAADLSITKTVSKHAYEIGQILTYNINVNNNGPDDAVNVKVSEEFPKSLHLKSFKMSAGEFNAYSNVWSIDKLAAGGEEKLRMEFEALSEGIFKNTASVVSDTFDNDLNNNHDSALVKIIANTSDKIINDLTDNFTKSNVVKAENIKQPVYCLEKHSTANFIELLSISVIVSMIFGGGDIFRKR

SEQ ID NO: 75555 - protein, 329 aa, Methanobrevibacter gottschalkii
ASKTAFITSDNLIDEKTDTNMLNSIKNYVEEISNGEIQVIVDNEAPGPGEGWRSISVTSDVSIDIAASDAGNYIQLASAATAGNKQIIFINTGDFDLDNHSNFLRRAWDDNYSNESLAGVRDPGTLLNNAGIQYIQLAKDYPDNIDNNGLLDKYDDKMNHEIAEKIVNIVNNYDNSSTKELSDNLIVKNKISPKGMADASKMLVESGDKEMNGPYGSYSTPQLLYQTSTYLNGDGIDIPKDYKKPDNPLGISFLTKDTYSVYDYFKMAGIVKNYMDANGKAPDSIEYEGAHISYYDLTYNFAKIVQNHTDANHMGFESEYHFDKVNDSI

SEQ ID NO: 75556 - protein, 28 aa, Methanobrevibacter gottschalkii
NSAPVLGGYEATGLGQNGFGSASSVGLN

SEQ ID NO: 75557 - protein, 20 aa, Methanobrevibacter gottschalkii
NPTLGANFITFGATAVILQA

SEQ ID NO: 75558 - protein, 11 aa, Methanobrevibacter gottschalkii
YIGVAPDLAIL

SEQ ID NO: 75559 - protein, 14 aa, Methanobrevibacter gottschalkii
GWGVSTFPYSIGYV

SEQ ID NO: 75560 - protein, 18 aa, Methanobrevibacter gottschalkii
LNPLIRPVTHLFLMGSSK

SEQ ID NO: 75561 - protein, 64 aa, Methanobrevibacter gottschalkii
FRLQMGIKLNTVFCSMSSTMSSTSILHTHLLKSILGEVLTKIIGPFIQSNINTGVGLYAYVPDI

SEQ ID NO: 75562 - protein, 72 aa, Methanobrevibacter gottschalkii
AFAGAEPDYYTVEIVNMTDNVDFGDIPIEKISNETYHVDSNYNEMELINDLKVPLNNSCKYYTVSWNAYSYL

SEQ ID NO: 75563 - protein, 11 aa, Methanobrevibacter gottschalkii
IGFSTVDGGPF

SEQ ID NO: 75564 - protein, 15 aa, Methanobrevibacter gottschalkii
ATWDNMWGLGSQTLD

SEQ ID NO: 75565 - protein, 14 aa, Methanobrevibacter gottschalkii
TNFGQITNFISINP

SEQ ID NO: 75566 - protein, 460 aa, Methanobrevibacter gottschalkii
DNTESDIIGADGLNSTSNIPMDAPRTFTQLNEAITPYTSIDLEHDYRYDNETDSEFANGVPITKNITIDGKGHTLDGNYLARIFIIKEDCTAVFKNINFINGKASTNGGAIYGVCNAENCNFLNNTAVKDGGAIHLSNANNCNFINNYVLNGRGGAMYKGYATNCIFTDNSAVTGGALFENSATKCKFTNNFAKENGGALYGGFAVQCNFNKNSAKNNGGALYKGSAHYCNFSDNYAVNHGGGMYGGAGEYCFFKNNAAKSGHDAYRSSLKKTKTTIYIKPTTTAHYGDYVVITLKNIKNKVVSGVKVSVFINGKKYATKITNKYGQIKIDTRNGFVIKKYTIKSKFAEDSNYYASSKTVKITIKKSTPKITANSKTFKKSTKIKKYSITLKTKQGKIMKNKKITLNVNHRYYYATTNYKGIATFKITKLLYKGKFTATTGYAGSKYYNALTKKSTIIVR

SEQ ID NO: 75567 - protein, 12 aa, Methanobrevibacter gottschalkii
IIPLPWTPVPVT

SEQ ID NO: 75568 - protein, 17 aa, Methanobrevibacter gottschalkii
IPWFGGMTGGFETLLGS

SEQ ID NO: 75569 - protein, 12 aa, Methanobrevibacter gottschalkii
NLTQGTSVGIVD

SEQ ID NO: 75570 - protein, 52 aa, Methanobrevibacter gottschalkii
YFYSSDNFHESDSSLNERHDDVVYLWMLDDNGKLKLVPTTETYSEGSASDPD

SEQ ID NO: 75571 - protein, 365 aa, Methanobrevibacter gottschalkii
MENKINAGYGSTITLENDYEYEESGYSSGIEITQDITIDGKGHTIDAKGQTRIFDVEAGKVTLKNITFKNGMQNFFFGGGAILWKSLDGIITNCTFINNYAPSGGAIRLEAWDNTISDCTFIRNTANQGGAINLNTTNYASISNCVFVNNDIYSVQGDGCKINNNIFMSCSIGFDFTRNYNIDNNWFGNNASNYTYKPNEFCNNWLFLNATTDPNTVSVSNTADIIFKLYAYNSTSGNISKYDNAPFKNLNLTITATNGNIDKNIAKLGETIKYTASSVGTGNVSAKVENVEYTIGLDIIPIETKLILNSTDTIIDSISTVGINVTDINNNPLSGVVKLTIKDNKGNEYNTTVTVKTGITTYIYP

SEQ ID NO: 75572 - protein, 387 aa, Methanobrevibacter gottschalkii
NITGFYLGNDTLGYVDSPVAETKFRVDKLNATVNLVVNNYTIRNFSVNITVTGKNTDRIVENGSLIIYANREKIDEINITDGKAENILLNITKIGNYELSVAYSGNNVFNENNTFSKNVTAIKISTIISANNIITTYNTDKYLEITLLDSEKNPLNNATLSVDLNGAKKYTTYKNGQIKIALGSLVPKTYTAKVSFAGNDIYSPYSTSFKVVVEKATPTITAKTKIFKFEDKTKKYTITLKNNKGIVMKNTKVTLTINGKTYTATTNTNGVATFKFNKLNKKGTYTASITYSGDKYYNKLIKKAKIKIKAPAWKTVAKGSKNKAIVKKIQKTLKNNGYYLKYNGRYLKIDGIFQKYTQIAVKHFQKANKLKTTGKVDYKTAKKLKII

SEQ ID NO: 75573 - protein, 16 aa, Methanobrevibacter gottschalkii
MADQIATLISSVGLTQ

SEQ ID NO: 75574 - protein, 14 aa, Methanobrevibacter gottschalkii
SGLLGGGQGLPTEA

SEQ ID NO: 75575 - protein, 27 aa, Methanobrevibacter gottschalkii
FIGDFPERIAGFRLPTVFAPVEAFKHP

SEQ ID NO: 75576 - protein, 17 aa, Methanobrevibacter gottschalkii
PGMPTSKTLLYYVSQVE

SEQ ID NO: 75577 - protein, 15 aa, Methanobrevibacter gottschalkii
PMKIPVAKGVEISIM

SEQ ID NO: 75578 - protein, 41 aa, Methanobrevibacter gottschalkii
SVIPLHPYAFAMASGVGSASMNAASLAPTVAAFPQLATQIE

SEQ ID NO: 75579 - protein, 15 aa, Methanobrevibacter gottschalkii
VPQPATPTIGAILKL

SEQ ID NO: 75580 - protein, 15 aa, Methanobrevibacter gottschalkii
IPLASTGSWEALFDL

SEQ ID NO: 75581 - protein, 13 aa, Methanobrevibacter gottschalkii
ISFNWVLNSYGNL

SEQ ID NO: 75582 - protein, 33 aa, Methanobrevibacter gottschalkii
MYNNYMDDLGGEIKSKEVNEFNNQLNALKVYFK

SEQ ID NO: 75583 - protein, 17 aa, Methanobrevibacter gottschalkii
YSNFMQSYGMESEMIIS

SEQ ID NO: 75584 - protein, 12 aa, Methanobrevibacter gottschalkii
IYPSAFNSETSV

SEQ ID NO: 75585 - protein, 14 aa, Methanobrevibacter gottschalkii
TMGVETIVRIILGF

SEQ ID NO: 75586 - protein, 150 aa, Methanobrevibacter gottschalkii
TGSTNKSSPIQNVDTEKYSAGSFSFKYPGDWQELNQTDEEHPGAIFYKAANNTTVEYYNVSSSASSLKEINQNRITHAQSVGASVTLLETITLDGRNASNIILENADGNYTRYVSMFSNGELYVFRLSGDSVNSITSDEINSVINSADIA

SEQ ID NO: 75587 - protein, 24 aa, Methanobrevibacter gottschalkii
ATLGGSLFGIFGGLTGFTLSGITS

SEQ ID NO: 75588 - protein, 15 aa, Methanobrevibacter gottschalkii
GYLGTFKEGFFTTEN

SEQ ID NO: 75589 - protein, 106 aa, Methanobrevibacter gottschalkii
VGYSIVSSSITNDISSGTQYDELAELKAEYSNLSVKFDNIKSTYYAGDADDVKVYNDAKLELSRANSAIENVQSALDADKPSNDVDSRIVFAKEKLESAEKAYNSL

SEQ ID NO: 75590 - protein, 180 aa, Methanobrevibacter gottschalkii
HIFFGMPLEFYTEGDATYHLSQFNKLDLDGDGNLTFYEVKGLASDISQDNLSGIFDAADKNNNGVLKGSEFDGYLQFIDKYYKELGKQQKAERKNSAQQKSSSSSSSSNPSFQDEGHEICPVCGGNQFTEFYNSQYGEMNWQCDYCGEIFRSDDEFYIDYWESNGIKCILPALENNLDII

SEQ ID NO: 75591 - protein, 16 aa, Methanobrevibacter gottschalkii
ASYGNIFGLANIAVSP

SEQ ID NO: 75592 - protein, 46 aa, Methanobrevibacter gottschalkii
DTYFGLPEQPGVRGAGIIGQDVEKRGGDIAGGFFQGNITCSPDASA

SEQ ID NO: 75593 - protein, 90 aa, Methanobrevibacter gottschalkii
LNPDQLYVRPAPQEQIGDGLSIAPYDRGGEVLTQPGQINPQYPDNSRELGMITAYMSPISQWVSSISPYFGTSIYSSPGGLIDEILYYTR

SEQ ID NO: 75594 - protein, 16 aa, Methanobrevibacter gottschalkii
MVFIPQFVPAAFLNMY

SEQ ID NO: 75595 - protein, 24 aa, Methanobrevibacter gottschalkii
MDFVTLGGNLLGTIPLGDIVLYLT

SEQ ID NO: 75596 - protein, 18 aa, Methanobrevibacter gottschalkii
ASTGTLSLAVLSQMPVSP

SEQ ID NO: 75597 - protein, 22 aa, Methanobrevibacter gottschalkii
VTGSMNIGEIITYQSVNGPLVF

SEQ ID NO: 75598 - protein, 14 aa, Methanobrevibacter gottschalkii
VKVINIGFLGMETP

SEQ ID NO: 75599 - protein, 19 aa, Methanobrevibacter gottschalkii
LPSPAYYTGDSSLAFVFTQ

SEQ ID NO: 75600 - protein, 84 aa, Methanobrevibacter gottschalkii
ASDVNSTDFSQLNDTVLDSSFNDNLSTVETSNNSKTVNNTNNGDMVQIIKTNPKITVKSTYLKSKDKLEFNFKNASGNPLKSKS

SEQ ID NO: 75601 - protein, 16 aa, Methanobrevibacter gottschalkii
MVFIGNKKYSVYTNSK

SEQ ID NO: 75602 - protein, 16 aa, Methanobrevibacter gottschalkii
NKIMYLRISKLSTRIT

SEQ ID NO: 75603 - protein, 33 aa, Methanobrevibacter gottschalkii
KKLIVKYKGKTVTKTSNKNGRISYKIKSSGSKH

SEQ ID NO: 75604 - protein, 26 aa, Methanobrevibacter gottschalkii
SSISKKTIVIKVASKKFSKKSSSEGI

SEQ ID NO: 75605 - protein, 53 aa, Methanobrevibacter gottschalkii
EVRKTQSTNYYCGPNSASVCTQVLKNYYCEKYLAKLMGTNRREGTKCQWIIDG

SEQ ID NO: 75606 - protein, 14 aa, Methanobrevibacter gottschalkii
FDNALNELKKGGAA

SEQ ID NO: 75607 - protein, 11 aa, Methanobrevibacter gottschalkii
NTTAGADVLSI

SEQ ID NO: 75608 - protein, 11 aa, Methanobrevibacter gottschalkii
SEIGLDLAVVP

SEQ ID NO: 75609 - protein, 29 aa, Methanobrevibacter gottschalkii
GMVDFTQALTANVVEIPKFYLPFMNYNLN

SEQ ID NO: 75610 - protein, 16 aa, Methanobrevibacter gottschalkii
ATLSVVYGNLSLAMSG

SEQ ID NO: 75611 - protein, 15 aa, Methanobrevibacter gottschalkii
SYILTGSYYYSGAPT

SEQ ID NO: 75612 - protein, 12 aa, Methanobrevibacter gottschalkii
TGDYYYPNSPQD

SEQ ID NO: 75613 - protein, 12 aa, Methanobrevibacter gottschalkii
FGDAVDNYVDSL

SEQ ID NO: 75614 - protein, 11 aa, Methanobrevibacter gottschalkii
YQGPQNIRFSG

SEQ ID NO: 75615 - protein, 567 aa, Methanobrevibacter gottschalkii
VDADNATLAEDAIPTDADVVQTKVNNANSGDTITLEDKTYDFANQTVTIDGRDKITIRGTGNTIIKGHGGQNSKTGALFIVSESIGVTFKDITFIDTNPNNNFTYDGNVEGYGITFDGSGAENGVVDNCSFADFNTAVNVKSCNYVTVKNSKFSGGYATKLINDPTVNKEKGSKVVSAGGSLFLSVLNCTFDGPMLDAVSIYGGSGDAKIIGNTFKDNVYAIFFGGASTEGTFINDNTFIECGQFVKDANTTWGGYPVISIEKASDSVYMNNNTFYAVNNNKLIAAESANTAHGAPSTLGDINITNSNVNLANDNVVAGSVTFLHILSRTGDINPKAPITLTGNKYAKGVKAVVVWYNDWGVEDSENIVIPQAPEPTPAPVAVSTSISSANLAIYAGNSGKIKLTLKDANGVAVANKTVNIVIDGVAKTVTTDDNGIAILSVKYSNSGTHYATLAFTGDNDYTGSIKTVKISVLKKVTALTITKKTFKVKTKNKKVTTVLKSGKTVLKYKKVTLKVKGKTYTAKTNSKGIATFNIKIAKKGTFKALTKFAGDGAYKAASKYSYVYVR

SEQ ID NO: 75616 - protein, 19 aa, Methanobrevibacter gottschalkii
DSTKSLNYTSFKAFLILTP

SEQ ID NO: 75617 - protein, 20 aa, Methanobrevibacter gottschalkii
MIIQGTETLTSIIHIFSESL

SEQ ID NO: 75618 - protein, 17 aa, Methanobrevibacter gottschalkii
PGLAALGTGDIATLAQS

SEQ ID NO: 75619 - protein, 59 aa, Methanobrevibacter gottschalkii
ALSVNPDMITEQTQTKEVSTANTFTQNYTDAGGLEDSGYSEVGKVYEDPSTGKLVMVSG

SEQ ID NO: 75620 - protein, 102 aa, Methanobrevibacter gottschalkii
FQFNNNVSTFMIVNETHVTENSSFSGMLVDSYGNGVANQTIAYHEPGGNVGTLTTDENGEFTVELAKYLSNSTSDNYYGDFKFSGNGKYQGCAYEGNVTVGI

SEQ ID NO: 75621 - protein, 14 aa, Methanobrevibacter gottschalkii
AYTSPEILNNINTS

SEQ ID NO: 75622 - protein, 23 aa, Methanobrevibacter gottschalkii
TALSGAIQSDISNPIQDLINSTG

SEQ ID NO: 75623 - protein, 15 aa, Methanobrevibacter gottschalkii
LNSSVTNLITGTINP

SEQ ID NO: 75624 - protein, 30 aa, Methanobrevibacter gottschalkii
LALFSSYILPGPLDVVNSALVVIENGKLLT

SEQ ID NO: 75625 - protein, 20 aa, Methanobrevibacter gottschalkii
GSSSGLGYMILIATNLFDTG

SEQ ID NO: 75626 - protein, 968 aa, Methanobrevibacter gottschalkii
DTDLNANTLEKSNDVTILNEGDSNVSQIHSQHTVKVGSDSDSIQNTIDCMNDGDILNFETGTYKDICIYVNKSITINGNGAELIGYDTPSKSNTPEIIYNDTGKGGYAIGNFATLYIVKADNVVINGLKITGGANSTSTYSNALIYAMNSKNLTFKSNVLEGSSWGLYFQYCTDGHVTNNIIKNQAVTGFLNFGSARTSIENNKVINAKNHGIDVRHGTGPNVKIINNTVIGSKEGIYLMHSTGHVAANNTLINCTISSISCYGSKNIKLNGNKMQKSRIGVLLGGGYENITVGENMFTLDNLPYPPTFAYYIAEAKSEYQNDEDIMGTFSDSSLYTPNFVAFTGIDVPKDIGINYDPILEKTGPEWIVPEGASSSEIQNMINNMNNGDTLSFTQNAIYNEISIYTDKNIKILGNNATLVGCSGINFNNTHYLDNVAEKVRKSTNEGGYAIGYNAVLYILNTTNVVVSDLNIKAQYPKYDSSKVETTTNEYKTVGIYADSNSGLVITGCDVTGASWGIFQQYCKNSTIIRNNIHDIYTTGIMNFGSPNGIIAGNTVTDAANHGIDVRHGTGPNVTIFNNTISGAKEGIYLMHSKGHSAYNNTILNCKISGITAYGSGNEVLFNNTISGSRLGILLGGGYYNITIGKNTFKLDSLPFPPTFVTYLARADNKYQSEDDVIRTYSDKETAAVDANDITVGYKKGEFNITLIGQNGDKLSYEDLSISINGANFTAKTDEKGIAVIPLSLTTGIYNMTIKFAGNDNYAPINVTKTVTVNDDRIKTILSATSKTLYLTIISKGYSYKVTFKDMNGKAIANKKISFKIDGKTYSATTSSTGIANIKIKATTTGNKKATISFKGDDKYAPVTKTLTVKVIKQSSKISAYKKTFKVKIKTKKYTITLKNNKGKAIYKGTVYIKVKGKTYKAVTNSKGKATFKITKLTKKGKFTATIKYYGNKYYSSTSKQVLIRTRR

SEQ ID NO: 75627 - protein, 543 aa, Methanobrevibacter gottschalkii
ANDNPNNSDDISNYQISSDLSNTEIQTMLDNAKEGDQFEFTDREYKNISLVVDKKLNIVSKKNSNIHTSNKIADKARNLGLNNSFGFYFTSNSGGSFLYGLTIISNSDYGIVVDKSDNTTIKNVVIKNGNVGILVKNSNNADIIQNNISKANSNSIHLENVSKSIISKNTISYNGRSGIHASNIYYCNVTNNTVHHNKFNGISLYNKTTGNIIKFNLAYENPNGIYINSQSDFDVVNSNTFTKNRRNTDYELGAFESGNGLLFGADFKTAKEGKSSRLEVKYNVLTHNEGYQAKNNPDLPTFKLGDNWFDSTDDENTFVCPMLLAGIMKMGTISVKNGFGLQMYDTNGEAVTEFGTFDTTVNVNGNQYTAKFVNGKAIIDANLDPDKEYEIEVIIGDKPVKFTYRTSSGDKNDESDSQTSTDGDFGINHHDFIDAMGNDASKGVGNSENGTSSAHFANSEQSGAHGTNASGNFQDSSDNGDSVLTNGNANAGDSSKGEQSEEGKAYEIVPQSKISKEITDTSGIIVLSIVSILGMIIYGYWRK

SEQ ID NO: 75628 - protein, 31 aa, Methanobrevibacter gottschalkii
QDIIYKEISPIFEKMVREFVNDPNSNLGFEI

SEQ ID NO: 75629 - protein, 14 aa, Methanobrevibacter gottschalkii
GAYMSADPVYNGIM

SEQ ID NO: 75630 - protein, 150 aa, Methanobrevibacter gottschalkii
FIDSSMDSINRTMPGVSDSIVNGDKEYNEAVQLVNDKSFDEAKTKAVSAENNYNNSLIKLNGIRNNFSSDINEVQEEYIGTVIKELELKINAVNNLKEAIDCFKINSNYTGTNYASKANDLMYEATEYQHERNSIVKNNSNLFKQQNFVI

SEQ ID NO: 75631 - protein, 146 aa, Methanobrevibacter gottschalkii
LNNNFNSHDSEIPNNTVSSQESNSANIQDSDNGGDVKTQVTSSQTTNSKSWEPIGSYSGSGSGSKTITVPEGKIKVEFSAYPIKNYATNYLTVSGSNGESGGVDWGSHSAVKTKSDSFIYTSSSSETFTIDYYETVSWEVHFYRYQ

SEQ ID NO: 75632 - protein, 69 aa, Methanobrevibacter gottschalkii
ASLIISDSPDSYKLIPIKNDSFEPNYINKVPTILPKVETNNTTNITTNKTNYNMTNLNYTNQWVETYEN

SEQ ID NO: 75633 - protein, 32 aa, Methanobrevibacter gottschalkii
FAFGSDINGLIGSPTNFFLQGIGIDDLSGSIP

SEQ ID NO: 75634 - protein, 14 aa, Methanobrevibacter gottschalkii
WGGGWLMQMGALDF

SEQ ID NO: 75635 - protein, 18 aa, Methanobrevibacter gottschalkii
FAVPAVNEAAGLIAGNAN

SEQ ID NO: 75636 - protein, 178 aa, Methanobrevibacter gottschalkii
LFNNTVNIYLDGENVSVETQTFEDIDSNSLNKDICSYTLNVMNNTTSDVETLKNGVEKLCYQHGLEDAEINIDSSLGHDQIPIIVHVDGTSMLPTLQNGQTVLVNKTHDFEVGDIVVAESKEYGGIIKRVDKIDENKVHLISDNKNISYEYIDGALYQIKGITTWVDISDVNGVVIDY

SEQ ID NO: 75637 - protein, 1288 aa, Methanobrevibacter gottschalkii
SDVNVTDSYTTSVADGASNVSVPIENSDDSSVLSLSSESDVGNVSSKNSESVKSNTLSTNSDTNSLSNRGNDVLEVNNTASPTINASETIASKDITKYYKGSTGYTAKFLDMHGNPLNGSDVKITVNGVTYTKKTNSVGVASLAINLKPGTYKIVSENLITGYKLTNTIKVLSTINANDVTKVYTDGKKFYATFLKSNGKALANAYIKFKINGKTYSKKTNSKGVASLSMTNLKKGTYKMVSYNKDGLTKTNTVKVVSKTSSKLNTNAYTFLKSDSKNIKVTLLNGLGYAPGSGKIIKFTVNGKTYSAKTNSKGVASLKLPYLKAGTYTVKYKFSGNTFYTASSASNKLYILPSKTATFTVKSTTTFGKGANTPFKVALTSGSVPLVKKTITLTVNGKSYDKTTDSNGIVSIPIDLQNGKYTVTYKFNGDSKVNAKTGSSSIIVKERTSTKVTWKSGTSFYQGAQSYKVLLQDSNGKALASKVVKLTVNGKTYSATTSSNGYATFNVNLAPGNYSISLKYPGDNSYAPSNGNVKVSVEKKENTGYGYWVYGEDMSNVDLKSLASKGTSDLFLNFKAIELHGQSKVESWIASANKLGMRVHIWMQIFYEGGKWVNPVKNGKPYEAFFEKKITEAQGYAKIKGVAGIHFDYLRYSGNGESAAHKTPGGAAAISQFVEDATEAIHNIDSNIIVSAALMPETTSILKYYGQDYSVISKYLDVVIPMIYKGNYGKTSAWITTTTKWFVDNSNGAQVWAGLQGYKSDSNVTKLSASTIKTDAQAALDGKAPGVIIFRWGVTNFVDFSSLSDKSTSPSTTGSVTIADIIAAANNLKNVINSKNTIPATVSVGGSSYSTAQFLYMMTEAVKKINGGKTSSQILPISVGVPTNPSGSFKSGNIASSEYVNMAISINSFIMENGRAPNFASSSSLGTIDYDSLVEMFADILTDYKDNNKLPTSVKVDNGTKSEVITAKTISIKDIVTGATNLKKYYNDYKKLPSTVTAGKITFKLSEFVYLMSKAINQIGKSNTKAITIITGIGNPTNPSGDNINSKYLSKSEYLKVALNVTNYINKNKVAPNYVSSSLGKIIYSEYVDAFSRILAFYGNENRLPNTVTISYSSGSGSNSGTGATGTGLNEALKNGTELSQYLKATKNCQVDNSKIKDIVNKVTKGLTSVKDKATAIYNYVRDNLDYSFYYNTKYGAVGALNAKKGNCVDHSHLLVAMFRTADIHARYVHGKCTFSSGSTYGHVWVQVLVDKKWTVADATSSRNSLGKVANWNTNKFSFNNYYSELGF

SEQ ID NO: 75638 - protein, 637 aa, Methanobrevibacter gottschalkii
SNTVDTNLTHDASSDANIGINDIESYSSGVFSDDVKSTGNVIVNQRNYKMYFDDSNVLKKEYGGKIIAFSGKFTDKGVITIDSENTKITGRNTLFNNTVFNIKSNGVMLTNLNFVLNKEFSDNEGACVLINGDNVTVYNVDIDYNVPKNVTGFGIYSNGLDESLSDVKLVNNTVRLHGNALNDGYNYGVVLTNTRDAIVYGNIIDCQLPLRAVNWMAEIYGGISMDAVSGLAAGSCNGLRLSNNYIRCVVNGVAQGEPTLDAVLIYACHNSTIENNTIIENDYVTKKGDVNYLYGLDLYLSNDVVIYGNDIHIRTSGGKEAHGTAYPIQVTGQAENILIAFNNLSSYSNGPNIGIYSQNYYGVTHLDIISNFINVTGHASKHSWALVAGIEVQDSDDRIMNNTIIVDTVNKFEKGYNVYGISYSQRTDGDHNYNIQYNNVSTNSDHAVALKGSGSSTVSNSIVANNILKGRKYGGNRAAYITGGTGNVIINNTDGSRPVHKMTDDEYSDNLKFYLSSPFKGNGLGLGWLDGDGNSIIGNGDRNGNSLNNGNSGLVNNKVYGNNLNYSESQARNGVLNSTYYTYGSSGTDIASASSSSGSGAGSSNSESSDVKSYEVTKKINDNLIHIPIVIMAVIAL

SEQ ID NO: 75639 - protein, 1075 aa, Methanobrevibacter gottschalkii
TEDVNDTAIADSEIDEVSAVDIEQSVDDNEITEIQSSDESNKVLARGTPTTAKDWNTLRTKCEKTTDQYITLTGTSYPIGTYITFKNSATIVGSDVSYITGGSTSNTPFVNNNSALTLHFINVKFLNVNAKNLLELDGTVYLDNCTFDNVQTATGHNSVIYNTNNLMYLTGCNITNCHTGYGAVSNYNSGSTTSPVMYVDDCRFINNSASVEPGAINNCGILYVNNSEFDGNHANWWAGAIHTHTNAQTEIENTNFRRNTAGWNGGALFTYSKLKIKNCTFEDNNCTTNNGGGAIGAYNYGSGYNITIDSSRFNYNTNLCYAYTNISTTSVGRGGAISVLNGGYLTVYNSNFTGNYAKIGQAIAAATYNYENGTGGNPHIKICNNKFTDHTATGIDTVVITGNDYIFNNNVFINSYQNTIYTGTGNTYNSAALPGNLNSKLNLKTKLRATNTEILSDYQDHDVVYVNVSSDKDAEDDNVHGQSWDDAYGGLECFVMAINYLHNNGIIYIADGRYNEDYGYEYSIAHGNFTMIGQGPKTNIEKIITTVYGGSDQNSTHNFINLSFTGKDFGINANFINCTFLGSISISKGLTYHDPNHVVEYGYAQTYFMNFNNCVFKDVNTTNALVTLYKYGAVNFTNCIFENITADSIVYRNDINYFEEDGISFKNCTFTNCKYNGIADSLANFDDAVVIEDCTYDSEVALGTTEVNGHYYINATKLKVTAVGTSISIKSNENNVIVNLTDVNGNPVANAGIIYSIAGTNASATTGADGTFTLSNLKGIVNITVYYSGNESYLASNKSDNFIFKYNTAVSSAVNGDDILIILKDDENNPIANANVIYTVNGIDYNATTDENGTVTVSNLKGKFAFNVLYKGDTLHTASNASNTFIFKYGTKITAKKVTATYNVAKNLVITLKDENGIAIAGKKVTVKVGSIRKTLTTNAKGQATLKVSNLLPKTYSATVTYAGDDTHIKSSVKVKVVVKKATLKVSAKAKKFKKSLKTKKYSIVLKNNVGKVLKKTKVTLKIKGKTFKAYTNSKGIATFKITKLTKKGKYNAYIKFAGSKYYNSLNKKVKITLK

SEQ ID NO: 75640 - protein, 347 aa, Methanobrevibacter gottschalkii
STVNYPRSHKTIEITQDNYENYFNIRTGKIIDASCISKGDTLKIGNISNRAFVIDRQLILMPISSNDKISNGFIHLIKGSDGSTVTNLTINNTKDRLNILGGNVGQLHGIWLSNSNNNLISYNTIRIANAAGVYAMPMGWSSNNRIIYNNMKTYITCNMVMGQCHYNLISHNSLELLSYSDTSVTNLIYFNPFGHADYSGSGLCKYNMISFNDFKGFSNGPMSILLQSVYENHDGTVIANNTFSKGSYAIHLFGNNISVYGNVVLNSGIGISVFGRNFSVHNNAVIGDSQGYGIMAEANGGSLCNVYNNNITFIDVYNAIFIGNHVKAYNNYINIKEYGVSIFIKGN

SEQ ID NO: 75641 - protein, 48 aa, Methanobrevibacter gottschalkii
NIHDNRINNKHDAGISVLGNNNTINNNIINTKNIGITLPARSTNCRYY

SEQ ID NO: 75642 - protein, 394 aa, Methanobrevibacter gottschalkii
NTFTNNKINSESYGIYIDGLVYNCIILDNIIETNSTMGIFKDITDELSNIEENNMVNGVILDSTYIIVNNTNYHKYFDKYGHLTFKFEKNKTKIIFLTFLTNKNLIFQEKINVISNKMNNLLINVTITFETNASGSLIRDFNFINHDKEAIILNGVNDVTVTRNNITNLFRNGSLSNSAVLIQDVCENLIISYNNIYVNSRTHCYTYAINAPSINPATHKMNNKLSKRVNILDNTIIMISSGITEAIYTDTLSESNFISNKINIISKNYGYGIAVSNMIGRLSDINVSNNEIVIHSEQMAYLIELLQVDNSTIENNKLYGKSNGVYAIGIYWSDNISVNNNAISVFGGNLSKILEISDVLGIGNSAIAILRNSSKIIISENIIYANLSKTIFDN

SEQ ID NO: 75643 - protein, 925 aa, Methanobrevibacter gottschalkii
TDGIINASFNSFIIDNENYNCYFNEVGELYSNVVIKNSTLLIHNLTKNQLLIINDLVKISSYDLNSPSSISIIFKNNASNSIISNASFINSSIDLINVSNINIINNTFNSSNSCILNINGGEKNLFVNNELFINSTDISVINLNKTLLNIIKNNNIKFNTSNSKIITINNSNFTLISNNVIIGISDSLIFICSKGSSYDNIYKNILNANASSICGYLASNAKWSSISYNNILINKSTNQSAIYYCNNSSNNTINENYIISYSLNANDYAVSVISNESLSNLIIKNYLISSNGFKRANFAVYAPFDLVKDNSPFDIYVSCNGSDVVGDGSIDNPYATIKKAIENSLNLYVIHVFDGNYTESNIIIDKNLTLVAVNLGKVFIDVQINQLFDILEDNTLSISGFLIGNAHNVDGGSVFINNGKLFINNVVIFNSSSYFDNSHPIFDQNITYHEDNLIDKAHTVDCSNTGKGGAILNNGELIINSSIFFNNFGHRGGVIADYGKTIINSSIFYNNRGIHGGCIYSDSKNNLFVINSIFNNNTAVTSIDFCKIMLHSIGWSIGENYIYNYKSECDSPIGAGGVIYTKNTSVLIKNSSFIYNSARIGGVIATQCDIFTQLSNFISDVNLYIDNCYFNSNKANDTRFKDDPLYLKNYDYFNDYNGGVVYGTYNKLYINASNFYYNQVINNGGVLYAKANDGKIIDSIFNNNRAGSNGGALDISKNFLIMRSIISNNSARYGGAIEYDSYTYYGHIQDNFNIYNSTISNNKALNAGGAFNIGSGNVSVHDSNIVNNFAPSGTTINSHGIKYAIDMRYNYWGVLPNGHIGPDDSVWNVNHNLFKPWYKQWVEWKPKVIESNNSGFNSNSSNHNPYINPNSNSGGNNHNNPISTGSSSSTTTSIGGANGNNHGYGNGKYFGSGDGNNLGPSSGNG

SEQ ID NO: 75644 - protein, 97 aa, Methanobrevibacter gottschalkii
AIPGYNKYNGQNVNSNTSSNSHKSQNRGNVDSDSLSKSNSSKYNPDLVSAGFTVNAASSPSSSQRGIERASKESGSLSDSASYEITKKIKEVFYDEN

SEQ ID NO: 75645 - protein, 2167 aa, Methanobrevibacter gottschalkii
DTNTSIVEEPMDVKHNLCDINNSLENQEIYVSPLGDDDANGSFQNPVSSIHHAVAMAKNNSKVILMEGEYKGANNTFILINKNLTIESFSNNVVINGENKHAFFKITPSSSLILNNIKFINGYTDSYSQLGIINNLGTLVINNSSFNNMNSIMGTFFNEGTLKIENTKVTNAVSLTMAQILTNIGNTTILNSQLIENNEYSSIDVVVYNYNRISIVNSQVNNLFSNKKYSEDSYNLASILINNSKLDNIDLEDAFVCIHNSQITFKSIFNGCNVSVDESTFLYNKSLFSIINVMNSNFTAIHSVFNSPISTKRSHVNITYSAILRSISGNAYKCYLYAPYNWWGINSGPSYQYFTDVNVSYWAISTFEYESDYIPINPNSTFTTTLNKWSDGNSTFEFKTEEYLPFRHLKFESQNGKFLYSSANIEKVFSNYLIGNNLDCQVHVIIDFQRLTLRIGEGLTNYNYFVSTEGHDGLGNGTFEHPFKTINYAVSKVGNGNTICLLEGIYKGNWNSNVTITKNITIVGLGNVNLLRSNDYSIFNIKEWGSLSLKNINFSVDIIDYAHPLIILNGGNLSIINCSFSNITSTNVIHTSNGIEHNGIVNISDSYFADISGSILIGSAKVSVSNSLFEKIKCYRIIQGYEYYNVLFAISSSIEIYSSCFQNNLMGIVNLHPFFYSSSKLRYSQYSNAYSRYAYIKNTKFENNVFFDKNSYYSSNGIGLDIYNENEHFYGIIDNCSFINNKGQLAIATSVNSSIFMNNFESRYGYSMVYADLINNSVFINNKNLYEDYNNVFIGNGIASAGCILESIFMYNEAAFGGAIADTKEAHYCVFVNNTSKYGGNDIYSYSGDVDYSSNWWGDNQKPNSDKVFIFLGTLTLNNWVIMTFESVSNSIIKASLNALNNGEGNICKINHNMPSRMVYFKINHGSLSPENTLLINNSAYTNMTYNLNLDFKVYARIDNQLLELDIRNTKTLLIMEDVIFKGKSNNFAVDLININGYKIFNQTLVVEIIDENNTQNIFTIQTDDNGHAEFNVDYPVGIYQVNINYLGNGYFDKCNSTSIMKIIKSNTYLISYNQTYYGKNNLFKSVLFGEGNKKLSNMTIKFTIIDSKGNLREIYSLTNQDATSEIIINLDVGEYTIRSEFLGDLWYSYSSSISHILVNPVSSTLIVSNVTLYGVGDVYNITLKDIHGSLIRGENIIVTITQGASCDKFTLKTDNNGVAKLTINYLPGVYNVKAQFLGDSIYAPTSGEGVIKVEKIFTIISGFHHCILPLNGIYTVVLSDMYGRRVNNESVTLSLYKGNLIKKYTINTDANGEADFVINLEEGTYLTTFEYGGNKWYCDATNAATIVISKKVNLSNININSTDLVQYYGENKYFIIKFNDPNAYSQYGKKIGVTISSGSWSQSYEVFTDIFGLARLKINLNPGEYNITYKYSNSHYNIFGTSSNTIHVYKMPAVLIANNIVMKSNEQQLYEINLRDINNNPIKNMLVNIDIDGVKYNSTTNDEGIAKILLSLGVGKHIISYNFINPNYLSSNSSSVILVVDSDKIPSNLYSQDINAFDNQILNFTIRLSDMLNNSISSSEVILELFTFYGESIINITGITDSNGRISFDLNLDYGKYIANLHYNGNALYLASYSTNTINIESADNRTKTILFNVETKLTNSKYYVILSDINGTLLVNKEIKFIIGNKTITSITDEKGRAYLELNLNPNYYIIKAIFNGDKDYKSVSSLKKIFISGELTHLYAIPLVKYYRNGTQFHARLVNSKGVPLINKILSILLEGNYYNCTTDENGWITLNIDLKPGFYDVECYYYSNNTDENSFDKTNITVLSTVLGQSEVKYYGDYPYLTIKFLDGAGNLIKNTSFVIDIDGKKYSAQTNDEGIFNFNLNLNSGSHLISVNNPYDGLFVTYKLDILTTICSNNLVKVFNNGVSYTAQLLDSFGNPLKNKNVKIIINGVLYYKKTDVKGILELNMDFNPKIYLVTVFNPVTKEYIENTVKILPTLINNKNINMYFSNCAFYKVRAIGSDGKIVESGVIVKIKVNGKSYKIKTNKDGYALFKINLKPGKYIITAEYNSYIVSNKINVKSLLTAKNIFHKKAKKIKFSSKLVDIKGKALKGKKITFKFKGKVYKVKTNKNGIATLTIKNLKVGKYTIMSIWNKFRIKNTIKIKK

SEQ ID NO: 75646 - protein, 1877 aa, Methanobrevibacter gottschalkii
TEEYLSSENYEEILSADSFNDNNILASASYNKTIYVNYTGDDSGSGSQNSPYATLNKAISNVNDSDNAVVYLSAGRFSGENNTDLSINLAHRNYNSSLTIIGAGNGQTILDGNDESAIFTSISADSIVTLINITFTHGKSEIGSVMTTSGNLTIDNCIFDNNYATSSAAIYAENTEDIKITNSVFKNNYGHEGCADFYCEGSESTIIDIINSTFINSTTPYLYSLPSFLIQYSNANIIGNKFENITGVYHSGTFELKYGYGKRKVINNTFINCNYTGNNDGGIIYISNTYLKNNQFINCTSKKALIYSLTEFNAYLKFKNATINGTEFKLYCEVTDDLNNSVSTYGEVHFFINDEKIKSSRSNNGTASISVIKLLDNGDYTLSGTYYYYENPFEVNVKNATLHVDFNHDPLELWVSNDGNDTTGNGSENNPFKTLKHALNYGFENTIDLTIHMKDGVYTGSDNKDLSYSNVGKLTIFGESYRNTIIDAENTKKIFNFGEYLNVTLANLTLRNTSGNVISAYILKIYDSVIEHADSLNGEYSDTSKIIFNNLTYTNSGGIYIYNAEIYNSKFKNCNNTKNNCLLRIGSLGNNIIHIENTTIINNTVNGRHGSSIVSISGNSVLINNDYINNTVISENSKYIFQSYSNKLISVNETFIGNNVSSYIAYYDINGNNVEIIIENITFKNNYVKTDGSGLAIKTGRIKGAKFINNTALNNGGAIIILPHYTGSQVPKCILENVFFENNSANNGKDIFIEKANIGYENGQLDNITVTFNSLITHNLQDIVIANISHVSGAVIGGGMIEFDLNGSYMGVAEVINGVAKLNYLGFTKNGNYTLSGSYNYESNTTIYNSAVVNVILNPLKENITSYVSDSRGDDENGNGSYENPYKTIENALNEGYKQSKVIFIKVLEGNYTGKFNNNITIYDSLNITIIGEGIDKTIITGNNTKNNWFITVLHAGNGFLKLINMTISEINYNYKNMNSQKSAVVIEKGANVFIDSVKFTKNRGYNGGAINNQGTLNIINSIFYNNGDSSYGGSIYNKGITIIDNSSFIANHAKYCSDMFNEGILNIYNSNIQDSMRTNGWTGNTLVIGGLGNISIINSKIFRTGKMPLELIDPDDTYADNPAFTISIGTIGSITLINTTIDGHDAKYTGPNFYITNNAAISWSVSTNIKIHNSSFLNLNNILNNQMGNLIIKSSFIKNVSNLIMSTSNYNLTVINSYFADGTISTEKYDISNIYLNNNWWGSNSKPTYKVDNVDTTPETWLILTLNQSNKESLLKDIILSFKVTDGENITDYTGYLYPRPFTMSAINATLEYANGNIINHLINQINMAKNATSYYIEAKIDNQTVNLTSNITHNVTIIANDIEFDYGTKTITVNVLFDNLSADDEIITLKVNNKEYSTKINNGIAIFNIDTLVRGTYTLNYSINATELHDNVINSSTLIVNGIDPNINASSKAVLVGNNVTVTITIPSDLTGTINVILNNKTYVAEIHDNKAIAIIPNLAQGNYLANVIYSGDEKYLAKNTTLNIKVLEINISAPNVEKYYKGSEKLRVIVIDSEGNAIVGQSVQIKLNNVNYTEITNQEGIVSVNLDLNVGKYSATILVNDKKINTEITIKSTIQGFNMIRGYNSGLDYQATLLNDDGTPLDNTLVKLKIGNSIYEVRSNANGVVKLNKKLAIGTYTVLITNPSNFETQTATLKIVSRINNNKNIIGDYLSGFSYKVRIIGDNGKSVGAREIVKFKINKKTYNIKTDKNGYASLKITLTPKTYQITATYKGQSVKNKITVKQILKTAKKINIRKSAKKLTLKATLKKSNKKPLKNKKITFKFKGKTYTTKTNNKGIAKIIIKKNVIKKLKAGKKYTVKVTYVKDIITGSVKVKR

SEQ ID NO: 75647 - protein, 1658 aa, Methanobrevibacter gottschalkii
INESEVVGNAEIENNLSSTNDNFEVSKDIGYNVSKKISTDNSNENLRNSQHMTLFIISDNPGTNILDKAILELSNENKINGVNLIIRNGNQVKSMNENELSYLLSDCDAFIGEWISSDVDSVLTSVLVKNPDLSNKKLFLVLEPPSGNLNSGSSSLNLIRNNTLNYNKIFTNYSNEELINYFKNTKRGNSYSNINNYLTNGNGKNFDSIFNRLVLYKDLNDKNNLKNQILFILNYLGVDVSYEQPTFTGVKNYGIYRDRWYSLDEYISTFFKATNNRTVGILESKMYIESQQLNTCYSIINSLESRNYNVIPVFADGGSAEQLKVMVESWTSAGDDISGFLSNSSNFDVYIDAIVSMVAYGVGGENFTKATSFFEEAGVQVFRAVHSDHVSNEQWELGSTGLTTEKSDKWWHITIAEAQGIIDATFIGGNSSYISNLTGAQITTYIPHEGNIGLLADRIDSWVDLKYTLNEDKLISIIYYNYPPGKQNIGSSYLDTIKSIYNILYTLKAAGYTVGSLPVDVSELEYLMLTCGINVATWAPGELEKIANRSCITLLPVSEYNSWFNSLDEIVRIQVSNGTVAYIGELTKRAVELDYTKTIGSTIDDWYNQVVSLLPDEKSVEAKEVLSNIVRALKDYANTHSQDYYRLYLKYFDEFKELNIQGLNGWGETPGNVMVVNKNGTDYFVIPGLTFGNIFVAPEPQRGWESDIKNLYHCTAVAPTHQYLAAYYYMQTRNPNAMIFTGRHATHEWLPGKEILLSATDYGSVVVGDVPQLYFYISDGLGEAIQAKRRGFAVIISHLTSPMSYTHLYGNLTFLANLINDYQKAGSSSEKNKIGEKIQDLIISNDYSTNLGLNKSQIKSISIDSLIEKINIFLKSTQDTLHPLGLHALGEYWSEEDIASTVSAMLSHDFVLENNQGTLNLFTELSNYYYSKSYGDLTPFEREFVLNKSYDICKALIYWDVNSVSNVLINGNVKFNNSNFYACLNLAKSYINLINQSISNELNAMLDGLNGRYIPTGEGGEIVVKPSILPTGTNIFQDQSSELPTQDAWNYAKILALLTLADLNDTTEKIIMGIWCVETARDDGALVSTVLYLLGMKPVWTNSSSAGFDDEGNPTGKKVGAMPEVIKLNDLTRPEGWNKKRIDVTIITSGLFRDLYSSQSVLMDNAFRVALARSYLTLINNKTLMNGKYGKELRQALDCVMEGINYYRASNEALKDNYVAQHWIKDCLYYLSIGYNASYAGECAITRIFAPPNGDYGAGISKLVSMSWTWNNTDELAQFYLGRMGNMYSKNYWGDTNPLVFLKALSNSDTIITSRNTNQYGVMDNDDFFDYWGGLSMAVEHVSGKSPKMNVLMYADKDNAYISSLEEVMYREIASRYDNPEWIKGMMKEGYSGARYMSNKFVSNLLGWQVTRPDSVSDDLWNRVYNTYYKDKYNLGVKDWLMSGNNAYSLISMSGTMLSSIHKGYWNADDATIRDIANTWAQATVKNGVACCDCSCGNVAMMQWAVQYVNPDILAQLLPKLYDATENPVFLNNTHNPNTKPENNNDPQVEPSTPNPTDGSSSSSTISNNATSTNSNQHSLSNSQNSQGNAVSDVGDSSSSDSGTFSSEGADVKKAIEINPITQQSASEVGMSLLAVLGVICLILIVGVGYFRDNGKEK

SEQ ID NO: 75648 - protein, 11 aa, Methanobrevibacter gottschalkii
SNLDELFNEKL

SEQ ID NO: 75649 - protein, 12 aa, Methanobrevibacter gottschalkii
TEQITGLIYSYN

SEQ ID NO: 75650 - protein, 20 aa, Methanobrevibacter gottschalkii
LPNITSMIQNPMDAIEIASP

SEQ ID NO: 75651 - protein, 22 aa, Methanobrevibacter gottschalkii
MVTTIPGSEILTSGLNMISQSL

SEQ ID NO: 75652 - protein, 17 aa, Methanobrevibacter gottschalkii
PGLAALGAGDVNTLANA

SEQ ID NO: 75653 - protein, 70 aa, Methanobrevibacter gottschalkii
SWNMQSIVFSDTSHDQSQSVQDSHMNVTEVSEGQELNDTLDSVESSGQGYMEMGKVYKDPSTGKLIMVEG

SEQ ID NO: 75654 - protein, 836 aa, Methanobrevibacter gottschalkii
ADDLQTKYAGEVSGDVNVVTVNPWTTSGSLTYDIPSEAKDIRSADVYVNVYGGSAKNTYGANANVSLKTANGENQIANESLWIEEGSSDGTIYAVNDHINKCYSDYQMHYDITNSIKGLNGSSITIKVDTFKMENKSFDGKIKLIALILAYDDGDSDVINYWVDATQKWTKTNVTTIFNTEKLSNINGANLINVALSSGDGSFKVNGEIIGDPIVHDSGNYYQYNSWDISDKMKKGQNTELLSMNVGSGSYASLKNVLSVLKVNPIKANVSLATEYADTCYAGTNNTISINVISDKKEKYSIELLADGNVVNSTEIELDGENQTILFLTDPTVREVDDSTVNGADNVKVNYMVNVRFNDVVVSSANKTVPVLYNGNLGKDLSYPSSGFASFENISFTGDIVIDIKNESSYKSGSTGTIEIFNVNLGKDSTIVKGFIYVPYNWFNGKKYVENETMFNVTFNNQTICPAGFHRDQSNLGNYGKYGYGVVVYDVTNSIKNGNNTFVLNKINPTPTIYPSTLIYMYNTTGSEVIKNIYIINGADLLSNTSNNAGRVVQANSNININSKDILDAKLYVFASGAQTNEGNIIINNNVFENVWNGTSKTTDLFATDITDIVKDSNDIRFVATGSTILALQQFIVTTKDAPIKTSVKPTKLSTTYDSGKYFNIKVLDNHKKSVKGLKLKLKVFTGKRYANYYVTTGSNGVASFKKASKLSIGTHKVEITTNNKNYVVKKTISYIKVYKAKTIVKAPKITVKFKKSKYFKVNVKNKATKKAVKNIAVKLKVFTGKKYKIYKIKTNKYGTAYLKTKYLKVGSHKVIVYSGNSKYSIGAKSSIKVRW

SEQ ID NO: 75655 - protein, 21 aa, Methanobrevibacter gottschalkii
TTIFNGINSISKHTGTMDFNT

SEQ ID NO: 75656 - protein, 16 aa, Methanobrevibacter gottschalkii
SDIVDIGIQNANFQFI

SEQ ID NO: 75657 - protein, 12 aa, Methanobrevibacter gottschalkii
YDAMRGSILTGD

SEQ ID NO: 75658 - protein, 708 aa, Methanobrevibacter gottschalkii
ATELISDNSNGTCIVSSAAVAEDNQILGEVDKPDLVVNITSDNIDDYFIRGRLKSIYAYATLCISEDIDDLGILTIKSNNVTINGNNHTLKNTVFSIEANGVTLNNIILNITEKFEDNENSAILIWRANNVNIYNTNINYIPPQDTTAYGIYSEGTKRSLNSNLKIINNTINFEGNNPSEGRDYAVCLEYSPNCIFENNTVNARLPLRTIAFDLTTAYLYSEFALAMGISNCNNSTFKGNIINCDVNERPECSFPTLDAIFICDSKDCEFIGNQLTLTDFKSYKNQPNYLYGLDIYRADNLLVEGNNIHVETSGGTFAAGTAYPIQLTGPASGIIIKYNEIFSKCNGPNIGIYSQNFNGENYITILNNHINVTGLAGNHSWALVAGIEAQDDNDIIMNNIIEIHNIRKTTKEDNLYGISYSQETKGTHSYKVVNNTVISDGYYLSHMLDADNTTVTNNTLVRTYKYADTNYDPFKRGDAIGKDTDEIKNNDFSGNRVITIFEYEIEQQGDEIDEGDEFNYEPPTNTGNHSNIINGSGISPLKPGFPGGNPLIPGSNSGGTINTGGNGNVGGFTNPDVADGDKGYIGLPDLSGDDGKSLSRKFNQRANVKTVNSFNNQGDASNSYNNLVSTENSTSSESPSVNGVTASGTISKSASSAGAAGSSGAAQESLKAYEITKNIVENGPYDMIRFIGLAIICELLLIVGYKRK

SEQ ID NO: 75659 - protein, 1824 aa, Methanobrevibacter gottschalkii
DNDTFTTNVSQNISNINTDEQINILTQKTENINEIHQTTENDQLSFSMHPPDDNYYNNKKGEIYHTQLILTIENFTTFSTANTTMNVHLDWDLYMSKDYYDTCQIRIYENNTKIHAFNVSDQNNAEYEHNAHQTLDVTFPYTIKDRTELKAVILQIESNTLSFEEIKKINLTNLNNNNIIVNNTYFSNENWTNQIKYLKKAINDAPTNSIIYLNNMEILNDEDITITIDKNITIIANNTIINGLDHGTIFTINSQATLTLINLTFTNISTNYIMQNNGNLKIVNNNFNNNIGRLISNNGNLTIEDSIIENTTKYYALFLNNIKTTSENGLIYNKKTLNIKNTTFNNINLNPLTNNNKKLDWNAIIVNYGKAIVTDSKFTNINYRTIYNNAILEIKNTIMENITSTDIFSHTIQYTRQLNNTGKYFSYIRATSSLEGGAIYNIKHSTITNTTFQKITGKSGAIYNKKTLNITNTTFQSINNGAIYNNEDLTISNSTFQTISGEAIYTKNANITNSRFQTISGKALYNIGTLNINNILINKSTGIHNDGILTINNTIINKCGGIYNNNQLNVNNTLFNRCSGVGAAVYNNNIANIENCEIIENHGDADTKWRYVEQPNGQVFSYIVEVYSGVIYNYKNAKINITKSIIKNNDISEESNGNWDTYYGIIKNDGEMKITGCILDGNKPREWIAFWGGDGSINIYNTGKLTYKYNYLLNTQYYTGNIHKPSSFLFNTGNGACDVNYNFYCLKPSSIFANANYNYYFVPYFGEYIPIKLNETRNITLSLGLTNGADYMTFNDWDKLLTPGLNATITTIDENGEYKNITTLLKDKYTFNFNYTHVKGEYIIYSNILNFKSSALVDVGKEFAEMEVNYNNITYKEGNITFHIKIKGNLTTQPTGNITLRYNNEKIILNLTDSECSFTIPEILKPDNYTMRIDYDGDDEYFKILNQYFIFAVYKIPTNITVVAPEVKYGQTGLITITITPGEAKLKGKLYINGIYTKNADTQGHRILRINRNPGVYNISVVFESDEYYMGGVANTTFIVSKWKTNLTLTGKDINAGEDAIVNITIDPGDVRGDAILIINGVNQTIFINNTVTPITISNLQNGTYHVSVYYPGDKKYAPSNASTTFTVSMKTTKLTVNITNNDDLTGNIHVNTDYNDCTGEVGVYINNDNVLIMNLTNGSCNFPVKFKRGNNYIYIHYIGDKYYSYASWNTTRFIEGKAIINTNYNHTIDEQELGYYIIKIFDSDNNPYEYTNFTALFQNKEIHLTTDENGVAKLPIQCRAGTYNITVKYKNTVKKSTVVVNATRMDIDIKDILAGENETITIRLPYNATGNITFKVDNTVISKRLSNGLAIVNISALTLGEHKLTVFYSGDNNYTDQKIEKIFSIKHSLSQIIASSSGVTYGEDVIVTSKVTSGASGSVTFVLNHETITVNLTDSQANAAFTNVPAGNYVITTRYNGDKTYKGSVCDVKINVKKAVPNIMVNTSPLLLNENIRIDALLNNDAMGNVTFHIQGQYSPRNRTVNNGVSSWLISPLSKGSYNLIVTYCGDRNYESITTSKILVLNQNETVLNVNIGDVNADDDLMVYATLNSDNKYKITGNITLEINDKYYKVVVSDGVGLRNLGEFKAGRYTYTATYTGSDLFSMSTIKGSFNVRCNSYKITGNKNIVQYYGTYKSYKVRLLNNNVPVKKAIITVKINKKNIKVKTDNKGYATLKLKLKAGKYSITASYKKVTVKNKVTVKPILITKNMVVKKGKTVTYTAKLLNKYGKKVKNKKVIFKVKGKKYIVKTNKKGIAKIKIKKLKVGKYKIQSIYGKVKNTNTIKIK

SEQ ID NO: 75660 - protein, 837 aa, Methanobrevibacter gottschalkii
NIDEIGNSSSDDTISLDDDISTINIVDNEISTNVDGEVICDGKSTRDTYSWADFKSEVENANINTIELNKGNIAPSSDSSNQISINHDINIIGGYGYYIGGDSWSSSTKYNYIPIITSGSNLNVKFENVTFQYLSDNVFMKLMGNGNYTFKNCVFSNINATGSHQSVIWLNYGHALIENCSFIKCNCSFGAVTNYYSSWGTAVNNARMTVRDSTFKDNYATTEPGAINNCGQLVVYDSTFENNEAVWWAGAIHTHSNANTTIIRSKFKNNYAGWNGGALYTYSYLTVINSTFTANTAKTNTGGGAIGASSYMSTPKVVIKNSEFKYNTALTGNGGAIVISSGTLNVESSEFTNNTALELNGGAISSSSCTAAISNCKFINNTLNKTAGKGGAVYGTGKGRLTVDKCEFINNAAKDNNSGHALAYYYTGNSNTAAYLTYTNNIFRGKDNGTGSVFVANDKVNIVQYNNSIDDITNYIEPENNTNGTSSGNITIPIGTDILSSSWDVILGDNLNGTSVIAGNYILIPASHDLYCYNYITQDLVWNFTTEFGYFHELLVDGNIVYAPASWDALYIFNLTNGESLTYSNIYQGSSLYKPVIYNNTLYVSSEYGYGINSNNWISMIKHDSDYYYYGSILELNNVSYGTPAILSQPYIHGNTLYVNTIQGLIAYNLVDGTSHNVSGTVGNPIIDANGNICILSNNGAAISLLNSNLEVVASTTLDGTCNKLISDANGNIYTVDNNGYIYYATYTSSSITCSKTKFNINPVSSAMACYDGKLYIGDNNGILWAFNTSKLDEPVLNNAVYRVFDAGSAIVGNIAVDNDGTIYIGTDNGHFYAIEY

SEQ ID NO: 75661 - protein, 1500 aa, Methanobrevibacter gottschalkii
DINETNLNADSFEIDYDDSISSSYDTNLQKLNQNDIEKTDESLEKSDNSSNRLLNEDNNNGLLGDGDGLKHLYVAPNATGSGLDENDPGDFITILNNTEDNTVIHMLEGTYLLSNITPIYQDGYYHFISIKSKNNISIVGENPDKVKIISNLTPKKRTSFIFSLHNTNNFKFENITFSAIKKDPKKEKTKSYFLLNKNNYIFENCKFIDAYSKFAIIELDEGTHLTINNCYFTSTDGHVGREISPRLFCSVLLNNTIFKNCCRYSDYKIGVMGNYSIFNSQFLEYDDNPLLYFQPYCNLIFENNYVDHPYNFVFFQPSDHYEGSNRMFCSHTTLTFLNGEDSVNVNCGDVINLNASLVDDLGNILSLYKLKFNLFENDLTYTNGVYQKEVTVPDVPGEYYIDVSDEMFTKYLGNCTVKAPIFIVKEAPEFLFDDKNSSTYGEDVIINVDSLDIPDGKLTFRFNNSEIIKNITDYRCSINLGVLPAGEYAITAYYAGDEVYGAKSYTKTFNVTKAKSTISLTKGHVDAIKDNGDVGFYFSTTENGNENTIGIILPDNATGKLTFKLDTDTYSIDITKRKVLLGNLDYGSYIIAVKYDGDNNFNESEECTFTLVNSKPSVDLTLNYSNINYTNPFNVNVTLNQDVVKDTIIFEVRDLEDNLINSTTGIISNKSANATFTGLNAGEYNIIAIYEGDETYCNSIASQRFNVNKIDLEYFTLKADKTISIHDNIKVEALIPVNVGGSITFRINGQDMTVEIFNNRAEAIFDNPGLGNYTVYATFNGDDNYNPHEENINITVIKADANLSVSAENVDWGEELVVVVKTDTRFTGNLSVKIDGVEKIVEITEGQGNVSFSNLKAGKYNVAVEFNESEFFTSSQKDINVTVNKIDSALTLDNDEMVFDYGGSASVTFGYDGAVNVTAEVVNHPEAVIKINEDCIVVSDLDAGQYTLKVTTVPDENHTGVDKEFEVTVNKIDSALTLDNDEMVFDYGGSASVTFDYDGAVNVTAEVVNHPEAVIKINEDCIVVSDLDAGQYTLKVTTVPDENHNSVDKTISITVNKVNANINIEDIVLDYGSHDITVFTGEGIESVNANILNQSYANVIVSGNNISIYNLNVGEYVLQLIVNPDENHNSVSKNVKVTVNKIDSVIDIRNEVVFTYGDAGYCDVYSEGAVDFTVKVINHPEAVININKNGIVKVSALNAGTYIMEVTTNPDTNHNSVTGRVNVTVNKADSKIIIPDIIFDYGNSGSVNILVYNATGIGNVNVVGHPEAITTINGTKISVGGLNAGSYILTATALTGDNYNPVNVSANVIVNKLTTIIGVKKVNGVYGSSGKLIVTLKDSNGNLLTGKLLRVKVGSISKTLTTNRHGQVSVNVAYLIPKSYNAKISFAGDNDLVESSNTAKVVIKKATPKLTAKTLKTKVKTKNKKLKITLKNKKGKALKNTKVTLKLKGKTYKAKTNKKGIATFKITKLNKRGTFKGTVKFAGNKYFKAINKKVKVIVKK

SEQ ID NO: 75662 - protein, 27 aa, Methanobrevibacter gottschalkii
LPINGIYHYDADFILNSFLLLDGLPYV

SEQ ID NO: 75663 - protein, 16 aa, Methanobrevibacter gottschalkii
NTGIFQPTQIMKYPPT

SEQ ID NO: 75664 - protein, 11 aa, Methanobrevibacter gottschalkii
AEQLVQAIYSY

SEQ ID NO: 75665 - protein, 12 aa, Methanobrevibacter gottschalkii
IVAPTIGISSLN

SEQ ID NO: 75666 - protein, 19 aa, Methanobrevibacter gottschalkii
PNIASSLTKNTSPITIASP

SEQ ID NO: 75667 - protein, 22 aa, Methanobrevibacter gottschalkii
MVLNIPGGEFLTGSLDVISQSL

SEQ ID NO: 75668 - protein, 17 aa, Methanobrevibacter gottschalkii
PGLAALGAGDINTLANS

SEQ ID NO: 75669 - protein, 66 aa, Methanobrevibacter gottschalkii
SWNMQAMIDPDQSIQEKMQQQKTTEVDQGQQLNETPDTSNSSGQGYTEMGKVYKDPATGKLIMVEG

SEQ ID NO: 75670 - protein, 250 aa, Methanobrevibacter gottschalkii
LLSGVGSSENIDIVGSTSVQPVAEKLVETYKQTHPDANINVQGGGSSVGIKSAQDGSADIGTSSKELKEDEKQGLTEYNIGQDGIVIAVNNENTVNDLSKDQLKDIFSGKITNWNQVGGQDGEINIITREEGSGTLDAFENIVMGKDTKIRSDAVVQSSTEAVKQSVKQDSNAIGFVSFAHMSNDVKALSIGGVSPSTDTIADGSYELQRPFLFLVKGTPSGDLKEFIDWVNSSEGQKVLNEEKIIKSTN

SEQ ID NO: 75671 - protein, 27 aa, Methanobrevibacter gottschalkii
LPAFQDYGFIQFLFGQTWSPNEGQYGL

SEQ ID NO: 75672 - protein, 11 aa, Methanobrevibacter gottschalkii
RFYFGGTGFSI

SEQ ID NO: 75673 - protein, 35 aa, Methanobrevibacter gottschalkii
AGNVPGIPNSIFSPVRTLTSNIALEMSYATGLHHN

SEQ ID NO: 75674 - protein, 25 aa, Methanobrevibacter gottschalkii
AVPILSFDFIFGQVIDAGKSGGISP

SEQ ID NO: 75675 - protein, 34 aa, Methanobrevibacter gottschalkii
VGSATTIPISMFDPGRPLPLHLYVLATEGVSLPN

SEQ ID NO: 75676 - protein, 14 aa, Methanobrevibacter gottschalkii
EHILRDYLNIIHGN

SEQ ID NO: 75677 - protein, 16 aa, Methanobrevibacter gottschalkii
FGQSTALTFPIHNIPL

SEQ ID NO: 75678 - protein, 20 aa, Methanobrevibacter gottschalkii
PEISDGGHFMMDMLDVAMPS

SEQ ID NO: 75679 - protein, 213 aa, Methanobrevibacter gottschalkii
ESDAVQDTGGESTSRIINVKVIWNDDGQTNNRPDSVTVRLLNNGSVVDSVILNESNFWNGTFKILDNGNYDVEETGDLSSYSISLTGDMDNGFVITNTIKQAPNNGSDDMIVDENSTDNSSDDVNGIIDDSNHTVDQNDAKDENQTENISQAKNTTYNNNDKEKQVIKKENKSVKKNNTNITGIKLKNTGLPVVVLVVVLFIIVITPISRWKK

SEQ ID NO: 75680 - protein, 47 aa, Methanobrevibacter gottschalkii
ITNVPGNLVQIIQEYSTSINATAAVNSTASAMPAVSSASWAALGTSL

SEQ ID NO: 75681 - protein, 1193 aa, Methanobrevibacter gottschalkii
DNQTNLGLNSNDVMLSDSYYFDANVDDDLGNGSLDFPYKQLKSNRVIDNSTIYLNDGIYYGFNKEFSNLTVIGKNSEKTIIKNIQFDIKGSLIIQNVTLINSKITNNANITLVNSIFKDSSSFIGGVLKSNPNTFVTITNCTFLNNHANRYAGVIYSNNSNLNICNSSFVGNYANYYGGAIYCEKNSKLTIINTDFTNNHAKNDAGGAIYGMDSDILANYLSISNSSSTFGGAITALNTNLNLTNFNAWNNKAKYRGGVIYSVYGYYIVMNSTFENNTASDGGALFIDSPHSVNVSSNKFIKNNALNIGGAVYIISNKNYFIPDNLFLNNSASFNNDFYKTMLSNLTIGNNNYVLINYNGSHIGNLPSSYDLRELNQTTSVKNQGSGGNCWAFAAIASLESCILKATGNAYNLSEENMKNLMTLYSNYGWKVSPNDGGYTSMGIGYLTSWLGAINESDDSYYESSALSPVLDSFIHVQNILFLKRNSYTDNDEIKRAIIEHGAVSTSVFWKVEKYANGENYYNYEYASGSNHAVVIVGWDDNYSKNNFIKKAPGDGAWIIKNSWGTGSGDGGYYYVSYYDARLAPINTSSVTYTFVLADSIKYDKNYQYDIPGMTDYLLNSSDRVWYKNKFTATDDEYLTAVSTYFQKETSWDLSIYVNNKLMLTQSGNSSASYSTIELNRFIILKKGDIFEIEFKITVDGDAGVPISEIASLNNLFYGENISYVSYDGKKWIDLFDVRWTYPGHTYNDSQVACIKAFTVLNKINSTIVLTITDENNPVEITAKVLNQYGNPIKTGKVTFNIEGKDYIAKINNGFAKLIHIFNGNENKLIIASFSGAGFIESFSDITFCPEQVSIKASDMVSYYNKNSYSITLLDIYSKPVADKEVKFKINNLEYVAITNENGIAAITFNLYPNVYDVIIGFNSINFDNYNVTKKITIKSTISIPENTVYTYNSKYPIKLLNNNGNPLSNCKFKLVINGITNYAHTDSNGAFKYNINLKPGKHTITVINTKTGEKSTQKIKVVSRITQNKDFSMYYGAGRNYKVKVADDYGKVKKNLKISFRVNGKTYYRYTNEKGYAYLKISLKPGKYTITANYKGYKVSNKIRVKPTIITKSIAVKKGKTGKFTAKLLNNKGKILKYKTINFKFRGKTYKVKTNKYGIATLKIAKKYKITRYSIITSYRSEKIKNTIKIKR

SEQ ID NO: 75682 - protein, 1178 aa, Methanobrevibacter gottschalkii
LNVDDNATIEDTNLNSMDVNFDISNGEFNSINIDKTFDTNIDADAGKDTNIEEKTISITNSNNSILSTKENNVKNNFKLNSGSLRAGNIIYISSDGTGDGLTSNNPTNWANGYINAQSGDTISFLDGTYNLVNVNLNKDLVLKAFNEGNAIINANRAGNVFSINNNRNITINGLTFINGKSTGNGGAISFNSGALTVINCRFINNTASSYGGAIYLRDGKLTIVNTTFVNNSADVGGAAIADTISITHSDFINNTADGSGGAIRAYDNLTIVDSIFTNNTSINGQGGALYTPNVDINNSIFVNNTSLNGGGAIYSSNEYLINNSVFVNNSAIDGDGGAVSSYRTGNINNSNFTNNSAKKSGGAAYARESIEIDNSSFNKNYAGAGGAVRAQSEVNITNSNFTNNVANNEGGAIYSNGKIVVNNLTFINNSAIESDGGAIFSVEDVEVDNSNFINNYAGELGGAISAYNELTVNNSNFTNNNAKYYGGGVYANVLNSNRDNFVNNTAEYNGGGAYVFSNANINGSNFDSNTAVNGGGLFSTGNSSVNNSNFINNNAYDGSAIISGNLHLNNNNLENNTSRGYGIVYAENATIENNKFIDNDALEDKEIYVLNELSQSNNTLSPNQIENINANTVKVNTINGTTYLVDLEDGLKGYCLQRTLNFPDYVYLLNNLSLAHNQLTGEDVSEYLKILIYKYYFSDKKDNITYSLWDFTDSDFRNSNNNLTKKVIALYNSGFRVPDSNASLILDNGTQVLFDFYSAGSSTTQNLFLFNITYMGNNYDMKVEKITLNKSVINGNKTKFIIRVTNIGDTILHGVTVFEKEYDGLVYDSYIDEGNNWNYNNGKWIYKKQLNINESAEFTVVFKTIKSGNFTNIIISSSNETTNKTTNNTTTVYTPNLTVEKLSLNRTVYVGNQTVFTIVVRNTGDCDLGEVFVVEKAPEGLAYSSFKGTDWSYNNGKFTYGKTLKVGESVSFEIVFDAVSSGNWTNVVVAGSNLTGNKTGNNTTKVYNPGLKVEKITLDPVVSVGEITSFEIIVTNTGDCKLGDVFVHEDSYEGLRFHSFRGDMWKQKGDTFYYQGVLNPGESASFVILFTTLKPGNFTNIVTAGSNVTNNTTTENKTKVIENHTNNNTNGINKTVNNETKEVNVHKVDTSRATGNPLLALLMVLLMISVTSVRKFKK

SEQ ID NO: 75683 - protein, 1582 aa, Methanobrevibacter gottschalkii
TDNNITDINNVNSNLSNVLKSSSSLNDGDAISYDLMDNKDVISQKFSSNSNTNDKSNMSDVVDSIESVAEPTSLDSPILRSVVPSGITFDGVFHVGTGQQYSNIQDALDQCRRGGYNYQIIIHEGTYTGYGNKNLVIEPTTWWNPNFGYLDIRTANDGDVVILNAERSPSILTINSRNVHITGLTFMNAYNYGSGGTSGAGVAINIRKGTVSIDNCSFINNEARNLWGGAVHIDSSITNRISNIDITNSLFVNNSAEVGGAFRSERYSSNINIINTTFINNTATEHGGVACLFSTDVTFANCTFINNSAPSSGGIHFHVGGSHIDNCTFINNSAYGTGSSEEGYGGAIALVYSTSDGVIISNSSFSNNFAGKYGGAIDVNGSGSNAKILNCNFENNTAGYGGAIRVQGSNTVIDNNSLINNKAINTDGGGIHVEGSNTQISNTIFRNNSAAANGGALAIVAGDNTFVSNSVIANNTAVNGAGAYIQGRRVTISDSIVANNTADQNGAGVYIDGSYATIKDSTIYNNNATVNGGGAYINGRDATISNVNFVLNNAIPDEEALDDGLGGAIFIAGSNSYIEDSNFTYNTARNGSAIYIDPTSSIANNYIYNCNFTENQAWSYWLPIFYNDVTKTIESNLTGGNNILNAIYNNGSNLHIFIDGVNPVLGWENSQNGTIMYQDNREFNQTIVTLVWDRHGNLVFNETAVTDLAGNVCYDIPQDTHLWFIVSMTHLEDTYYKEITNITGININPGLTITDVTMYEGNSTPQTIYIVLADDDANPIPNEGPIMIYVMVNGNKILLGSGNTSKNAVLILNESAVFKTLNPGNYTIIAECTYAYYNETTQSISNKTVSTEGILEVLPYIWSLNKTISHVNGIPYIEGMVIQINDNVTFNITVFNEVNTTLYGLKLIDLNTEGLSYVSTLPSNWNYEGNNVWTLDNLVNYGNSSLFVTFKVLKTGNLTNIVNCSFLDGFKNKSANITFAVNLTADLGVSKVVNVSNPNYGDFIKYTVVVSNAGPDDATGVVVNETLPVGLVYVSDDASVGSYDHVAGLWTVGSLAKGDSATLIVVVRVGGTGNIQNFVNVSGAEYDNNTGNNKANVTVAVNASADLGVSKVVNVSNPNYGDFIKYTVVVSNAGPDDATGVVVNETLPVGLVYVSDDASVGSYDHVAGLWTVGSLAKGDSATLIVVVRVGGTGNIQNFVNVSGAEYDNNTGNNKANVTVAVNQLKTYIIVFNNTVYPGDDVTVIVTVTTQNGSLFNGNVNVALNDTANTTKVVTIVDGTGSFKVTVDKNLVNGYVIGINASYDGNDTYIGSKGFGWIKVLPVKFHVEKTIVKGNEFFIGDEIIFNITVYNDCNGTLYNLVVSDVLPNGVVLINSGFGLWTYDGGSSWSYGDLSAGASATLIIKSSAVKAGSFTNDAKATVNDVLDNSSLVDFSISKLNTSISVSNVTGHPGDVVVITIKVSTGDNVPFNGDVDVILLDGKKIIVHVTNGIAKFKWTIPKNAKNNTIFSIFVSFAGSSKYFGSNNTGFIKVIDNKQNKTNHTDNNDFTDKCNKGIIKNTGNPLLVLLISIVILVISLKRRKDY

SEQ ID NO: 75684 - protein, 14 aa, Methanobrevibacter gottschalkii
SQTPANDDNSIRFG

SEQ ID NO: 75685 - protein, 27 aa, Methanobrevibacter gottschalkii
NDLNIVSTAINAFLQMGSQIISCMADP

SEQ ID NO: 75686 - protein, 15 aa, Methanobrevibacter gottschalkii
AGFESVGVTNVTGFG

SEQ ID NO: 75687 - protein, 35 aa, Methanobrevibacter gottschalkii
YTTILGGEDQALIAIMKSSPLSFNGVFTALSQSDA

SEQ ID NO: 75688 - protein, 20 aa, Methanobrevibacter gottschalkii
GDVGTANYLVGVLKNTLPQF

SEQ ID NO: 75689 - protein, 12 aa, Methanobrevibacter gottschalkii
AWAVGSGDMSFT

SEQ ID NO: 75690 - protein, 150 aa, Methanobrevibacter gottschalkii
NSFSLIFNDNGTNDANDVNESMITVGASSLPEIENFTDNTLNDTTISLVDSNKNMTILVSEIDNSQSISDIFNNFVSSNDISSTQTIDQNGVTTYLAYSSGSDSYNADIFFNKNGQNYCISGDNILSSDSDYFINHCKGIIDAISINSTS

SEQ ID NO: 75691 - protein, 13 aa, Methanobrevibacter gottschalkii
VPAIAQDFAMNNV

SEQ ID NO: 75692 - protein, 11 aa, Methanobrevibacter gottschalkii
YHLQYVRGWDA

SEQ ID NO: 75693 - protein, 18 aa, Methanobrevibacter gottschalkii
IMGNLELSPQYTTMIIQA

SEQ ID NO: 75694 - protein, 207 aa, Methanobrevibacter gottschalkii
VGNRFFIPHYETIADTDIGTVEVATYGNANATKCIALITGIHPRETLAINPEIDAAKQFANDDVKIIHYKVTVTKNAQDYSKGRANGESLVHNYVNPNVTASDADAVIISHSHIPEYGEGFYVATPAMDNASVKIGENINQSSDFNYYPVTGNETYKSTSAVLVSKPIAEAGYPTFVYEVPENVMEFIITGKTKDLFQLIIENTYDN

SEQ ID NO: 75695 - protein, 961 aa, Methanobrevibacter gottschalkii
SDNTTDDSVIDSSNRDVVSVDDNNVVSDEYAVNKVSNGALADVNGEENVNNDVDMVIDPINNVSVLQGDNVDVNITVKNIGENNASNVTVNFELPDGFSLIDSNNVSDNTWHIGDLQSSKSTNITVKLNNSGINNGDYVINLTLRANEGIEEIFKQNVTVNVIKKLIQTNLTIDFDKESYVYGDDVGIDVKLPDDATGNVTIKINGTENNASINEVLILSNLTPGNYEVNVTYSGDDKYNGSSGKARFTISKANTTAAIDIVSIKVDDELNITINYDSEINGNATIYVDNIKNQTIEIIDGNGNVTIKGLSKGMYDIKVAFDGNDCYNSSETNKTIEISKNTVNMLINVGDIVYGNDLVINLKLPDNLTSNVTVSLGDINRSINCSGNVTFKDMNAGNYTAIVSYGGDENYFNETKYVDFKIYKASTQTTVNTSDINIGGVLNVSVDPKIDGTATVYLNGTKYSDDIVIVNGSGNVVISNLIEGTYNVLAVFNGNDNYNSSLTNKSIKVSRNVFNITVNVTDVCYGQDVIINITLPGDVTNTVDVVFGYNSQNINLENGVGTVKFSDLDVGNYNATVIYYGDAKYLKSTQIISFNVTKAKPTVDVNISGNKLGQDLVINIALPSDVKNNVTVGIDNISQDVKVTNGVGKAIFKDLTIGEHVLIIDYSGDSNYLNTTEGIYFNVSKAIPVIDIDVKNIYVKGKEVIDIALPDDATGSVTIFINGVEQKTVNDNISSIVLTKSGLAAGTYNVMVSYTGDSKYESANTTVQFKVSKYKAKLTASSKTYNVKVKTKYYYITLKNNKNKVMKKIKVYLKVNGVTYSATTNSYGKASFKLSKLTKKGTYDALITYKGTSYYNKLTKKVTIAVKATPKLTAYSAKLKKSVNAKKYSVTLRTDKYKAMKYTKVTLKVNGKIYTLKTNSLGKATFKITNLNKKAKFLAVISYSGSKYYYSATKKVILTVR

SEQ ID NO: 75696 - protein, 18 aa, Methanobrevibacter gottschalkii
GIIVADPSTMVTLGSLFS

SEQ ID NO: 75697 - protein, 40 aa, Methanobrevibacter gottschalkii
AGFGVGDIAMPSVPTEFVSTTIDTSVFGAFASGFSQLFTN

SEQ ID NO: 75698 - protein, 1048 aa, Methanobrevibacter gottschalkii
KEIYVSSDGSDDLNGTDLNNPCSFHKAINISEDGDSIKMKAGNYSISEEVDKSLNISAYSDDVVNIKNKFSYVFKVKNNNSLVLNSLNFKNFNTAIESYSYPNIMIKNCLFEKSSYMCLNMRGGTTIITDSIFRNNTGSQGSAINFQNTLYKNRSYLHINNTIFDSNHGTNLGGVIYISLSNMYLYNNTFINNKAGYTGGVIFNDVSKVYDNRSRYINNGALYSGGAIYIRGDKDLGSYYGDHVEFINNSAPYKNGDSGGYGTSGGAFTAVDGGEIVLKNSVLEGNKAMSRGGAIWSDQKVSIINTLISNNSAYNETGLTVGGGLYCPLLKVNIINSTFSNNHAKEYPDIFNDITFPSVDIVENINNTDGKKISIKNLTKPVSYCLQPGILNIASSPIIETGTNKLLGSGGYFNGKPIGELLKIFIVQNYQRVLDKKISENTFKSMLGFISSGCSSLPSPFNDSYYLSHRLIKETLDEYEKGVRYPDVNATGPINWLTKKYLTFDFYQFSNEDHQDLIVFTFNESNTTLNPPINVTKKSNTTNPDFNTVVSYVITVKNTNKTSMVFDALVIDTLSEGLVYNGASHNGVYNNTTNTVTWILNIPADSEINLFVNATVEKFGKLNNTVNVFNKTANVTVNVPNTDVTKAVNVTRPSFNDTICYTITVFNRNPNVDLMNLVVRDVLDDGLVFNGASSGGVFDPISRTIIWTINITKGGQAVIYVNVTVNKYGMLVNKVFVDNKTANSTVYVPIEPPVNPDMTVVKLSLNRTVYVGNQTVFTIVVRNTGDCDLGEVFVVEKAPEGLAYSSFKGTDWSYSNGKFTYGKVLKVNESAGFEIVFDAVSPGNWTNVVVAGSNLTDNKTGNNTTKVYKPDMAVEKLSLNRTVYVGNQTVFTIVVRNTGDCDLGDVFVVEKAPMGLVYNSFKGTDWSYSNGKFTYGKVLKVNESASFDIVFDTISPGNWTNVVVAGSNVTDNKTGNNTTKVYKPPVNPPVKPPVNPPVNPHKIEKPDNEKDKIIKKDSSINIRKTGNSIFLMMLSVIISIPLIRRNQK

SEQ ID NO: 75699 - protein, 169 aa, Methanobrevibacter gottschalkii
FIGSSNVTLMAGDSCITLPSDYMLDNKGIAYKNDIGIFFISVSGNSPKDQKELFDAIKSNGKSSGYKNVTKDKVNGFKLYEYEANPDKLKNVSSDRKISGSYETWKTYSPYTPYEDVSDMDVTKFRYIAYVNENTDDISELYIFTNNTNVDLYSGEITKIIDSIAVVEE

SEQ ID NO: 75700 - protein, 52 aa, Methanobrevibacter gottschalkii
GYFGLSDNALESDSSLNESHDDVVYLWMLDDNDNLKLIPTTETYSEGSGSNS

SEQ ID NO: 75701 - protein, 319 aa, Methanobrevibacter gottschalkii
YENYDDFVFNNITIDDSGHDDTKLIDEKSFYYYEEDSGYLSDNIVGGKNIKNTTGVVMADDEYSCGAASFATVLNNLGNNITLYEAKIATNTTLNGTTMKGIIDATKKYDLMGVGVKLETVQLKENYIVNMNILGITHWSVVKEINEEFIILADSNLGNYKFDIMEFNQYYTNQTIVILNKQQYNNHISIVSNNTNYISNIDQKYISGNGYAFYVSKSMSYINANPKGYAFKYTIIVPKWGGKVVKLSTKKLTKHRITVKVIYKIKVYSKSHFKGKVETIHQPAIFNLAHKAGTKFSVSRPTSFPIQSIKYTVSYSHFP

SEQ ID NO: 75702 - protein, 22 aa, Methanobrevibacter gottschalkii
LSHYAVMAPETTVFTQQAMLDA

SEQ ID NO: 75703 - protein, 41 aa, Methanobrevibacter gottschalkii
GPSLDIANFFIESIGAYMNDFIRMSFRTAASGTVAQQGWVQ

SEQ ID NO: 75704 - protein, 29 aa, Methanobrevibacter gottschalkii
AMNGTTPGSPIIKMPISNMLFGIFNQYPL

SEQ ID NO: 75705 - protein, 16 aa, Methanobrevibacter gottschalkii
VGLLNEFVYNKIIINP

SEQ ID NO: 75706 - protein, 143 aa, Methanobrevibacter gottschalkii
FFSGGDSVNVTDVGMTVNYNYKTNVAFTIIPTDTITEVNNVQLKNIEVTYHNGKTQHLEDVTFNSKNTYVKDNEYGFKFDYTISDDCIDGLDEYDFGHATHHIKGDIVINTVGGNEKVVGHIDYDVPASATVYKYSSGSGSVI

SEQ ID NO: 75707 - protein, 135 aa, Methanobrevibacter gottschalkii
VETTTHDFDGLFNMSVPSDEEFVTLDSNITGASVFGYNFNYGDPIGDNIIVYYFNESIVDDNDTNITEYVINILDENSTFKHPSVEDGFTVLYNQMVQHDGGYMLIASNDNETEVVGIVGDNLDDLKTYANSIEF

SEQ ID NO: 75708 - protein, 90 aa, Methanobrevibacter gottschalkii
ASENIDDSKFSEESDLDEVDSDLDEVDSDLDEVDSDLDDLNDDSDLDDLNDDSDLDEFDDDSDLDEFDDDSDLDEFDDDSDLDEFDDDSD

SEQ ID NO: 75709 - protein, 85 aa, Methanobrevibacter gottschalkii
YNQRSSSYSSGHDYIFLDNLASSSYSNYFRSDLKNLKIKTSNGTECQVVYIPSYGSQGAAILARVSVGQISQNTKLLLDVHDTGT

SEQ ID NO: 75710 - protein, 16 aa, Methanobrevibacter gottschalkii
NDTYSQFFMNYSGLSS

SEQ ID NO: 75711 - protein, 12 aa, Methanobrevibacter gottschalkii
NVFVNDNATYHG

SEQ ID NO: 75712 - protein, 22 aa, Methanobrevibacter gottschalkii
MMQIDGTLSPDESNVKATVNYW

SEQ ID NO: 75713 - protein, 16 aa, Methanobrevibacter gottschalkii
ASSFDAYNQGSDEEGN

SEQ ID NO: 75714 - protein, 11 aa, Methanobrevibacter gottschalkii
MYRESQNCIDL

SEQ ID NO: 75715 - protein, 39 aa, Methanobrevibacter gottschalkii
SFEQDEITHVVNMIVPSESNIMAQANYVKDADGVTYCEL

SEQ ID NO: 75716 - protein, 11 aa, Methanobrevibacter gottschalkii
YWNGTRYVDSG

SEQ ID NO: 75717 - protein, 57 aa, Methanobrevibacter gottschalkii
LDEAIKKGLLGEAKDIAPGASLQELNIRKPVTDTISIDTVGGVLNVNKDVFDSDIVS

SEQ ID NO: 75718 - protein, 80 aa, Methanobrevibacter gottschalkii
ANRIEYNIYDTLISSPNVPQYNTTQTDDTMDAFGNFVIKAQEAFKGNAGAGADLTIMAESYKTLSYVKQLAYSSNKLVQP

SEQ ID NO: 75719 - protein, 17 aa, Methanobrevibacter gottschalkii
TQADGGSLIGEKQYIGF

SEQ ID NO: 75720 - protein, 20 aa, Methanobrevibacter gottschalkii
SKVGILLNKPGLALKGTCRP

SEQ ID NO: 75721 - protein, 48 aa, Methanobrevibacter gottschalkii
LGEAKDIAPGATLQELNVRKPISETISIDTIGGVLNVSAQMLDSNLIS

SEQ ID NO: 75722 - protein, 46 aa, Methanobrevibacter gottschalkii
RSIEKAAIDMIMNSSKVATYNFESGDDTGMTILKAQEKFKESAGSY

SEQ ID NO: 75723 - protein, 21 aa, Methanobrevibacter gottschalkii
VSYKSLTTLKSDIFSSNRQVE

SEQ ID NO: 75724 - protein, 14 aa, Methanobrevibacter gottschalkii
SEMGDKTYIGMDYI

SEQ ID NO: 75725 - protein, 19 aa, Methanobrevibacter gottschalkii
NSIAYWLLQNKKKYKKRDH

SEQ ID NO: 75726 - protein, 12 aa, Methanobrevibacter gottschalkii
CSDIEKKAKKLG

SEQ ID NO: 75727 - protein, 14 aa, Methanobrevibacter gottschalkii
EYVDMAIRTEAYIR

SEQ ID NO: 75728 - protein, 13 aa, Methanobrevibacter gottschalkii
ALAIISKMKLYSK

SEQ ID NO: 75729 - protein, 16 aa, Methanobrevibacter gottschalkii
QKTDKKTINDASLGKG

SEQ ID NO: 75730 - protein, 18 aa, Methanobrevibacter gottschalkii
QVYYRIAKSLGYDVQFVH

SEQ ID NO: 75731 - protein, 19 aa, Methanobrevibacter gottschalkii
TTSGNVKSIWCEDGYLIAY

SEQ ID NO: 75732 - protein, 16 aa, Methanobrevibacter gottschalkii
NALLVVAPDFAKAQNL

SEQ ID NO: 75733 - protein, 12 aa, Methanobrevibacter gottschalkii
NPLMGGEIISPD

SEQ ID NO: 75734 - protein, 27 aa, Methanobrevibacter gottschalkii
LRDYFIGSIRNSMGNDYVNVIAPFLNY

SEQ ID NO: 75735 - protein, 216 aa, Methanobrevibacter gottschalkii
GESVGLEVNVNNYYNDTNLADGWIYSPNLDMNFIDDVNNLTPTTQSERQLVLDSIADFSNNPEIKLHFIENNTISKFYLMDGEPLNISDEDGVWLDKSFADAKNLKVGDNITFEFNGFKIKKEIKGIGYSPEYVYHASTSSVIPDFNKIGFAYMSYKAFPTDNIPYNVLNVKFTGSPEEYNNLLSDKLDGEYNSFVEQSEHSSVSQFSEEINQHKM

SEQ ID NO: 75736 - protein, 23 aa, Methanobrevibacter gottschalkii
PQLFYPSMSSTYKLPSWNPAWSM

SEQ ID NO: 75737 - protein, 188 aa, Methanobrevibacter gottschalkii
MYDGMNDLKEWEFNQINHYDSKLVIDNDASLSEIDDVARDVDGDKIMESAIEIESDSAKKSGSLIALNHTDLITPTDYDWNKMEIGDDEVSISQKMADMLDISVGDTVKWHIIGSDKWIKTKIDKIHADPTSQGIVMSSDKLENLDLNYTPTSIVTEQHVDKNYSIIKTVNSMKDITSSWDELTESMW

SEQ ID NO: 75738 - protein, 18 aa, Methanobrevibacter gottschalkii
KMMWDSSGDSFYILPSIS

SEQ ID NO: 75739 - protein, 210 aa, Methanobrevibacter gottschalkii
EYYGLEQTSADFYNETNLADGWIYKTSFDNADLDKINNLAMQTERQHVISSVGEFDNDPDITLHFVENNTISKFHVFQGKDFDINDESGVWLDKRFADSKELNVGDNITFKFDGKTIEKEIKGIGYSPEYVYESSATSITPNFEDVGFAYLSYKSYPDNVEFNRLLVKYNQSDDSFKEKLDDSISYLSFTKQEDHVSVAQFSEEMAQHKM

SEQ ID NO: 75740 - protein, 23 aa, Methanobrevibacter gottschalkii
PKMFYPSMTTRYTLPSWNPGFDM

SEQ ID NO: 75741 - protein, 189 aa, Methanobrevibacter gottschalkii
MNDSMDDLKTWEYDDINHFESKLVISNNASQEELYYVINGTNGSFIMQMPIEIKSNNHENTGVLLVSNNTDLISYTDSNKNPIEIKEGDISISTKLAQDFNLSIGDKIKWHIVGNDDWVKSEIGQIHAEPISQGLIMSPDTLEDEGLNFTPTSILTSEKFGENINSIKSVSTLEDMEESWSEMTSSVMM

SEQ ID NO: 75742 - protein, 18 aa, Methanobrevibacter gottschalkii
TLMMDAAGESLYYVPMLT

SEQ ID NO: 75743 - protein, 212 aa, Methanobrevibacter gottschalkii
LFMTPDLSHETKNILVLASDKEEQPNGGVDMAFMIRLENGSLKNYTPIYPGGMTHPTKSAPGGLQGPMMLHDCLWNGLGEGMQNAKEIVEVRTGMHADAVVVVYDKGIDSIIDSIRPLKINGTETNLSATDIIRQNDAYNGYPGNEHVQGTMSRSDAVMVLAKALANTAKDPVKKSTMVQTALKEYSNGNIIMEPQGSFTKLLATKGFESIT

SEQ ID NO: 75744 - protein, 11 aa, Methanobrevibacter gottschalkii
VSGLGADALAG

SEQ ID NO: 75745 - protein, 17 aa, Methanobrevibacter gottschalkii
ILNAMGAGQTIGYATDY

SEQ ID NO: 75746 - protein, 12 aa, Methanobrevibacter gottschalkii
TFVGSTDSVAVY

SEQ ID NO: 75747 - protein, 23 aa, Methanobrevibacter gottschalkii
GDISSVFASSGSSVRIAAELTGF

SEQ ID NO: 75748 - protein, 38 aa, Methanobrevibacter gottschalkii
INSTDITTNFSAMNLPPSFEHLFGTDWLGRDMFIRTLK

SEQ ID NO: 75749 - protein, 30 aa, Methanobrevibacter gottschalkii
TFLGFGLAPHEPAIGIILSESMKYLATGNW

SEQ ID NO: 75750 - protein, 68 aa, Methanobrevibacter gottschalkii
MSPINPVKTYISALGSVSSEKIAILEAYWGVNEPITTKVISWLGKIVQGDFGTSLIFRMPVIDVIKER

SEQ ID NO: 75751 - protein, 29 aa, Methanobrevibacter gottschalkii
VYLGWFPTGLGVPIGTLSENVSIWEWLHR

SEQ ID NO: 75752 - protein, 23 aa, Methanobrevibacter gottschalkii
EQIFTYPGIGQAAVSAGLKSDVP

SEQ ID NO: 75753 - protein, 519 aa, Methanobrevibacter gottschalkii
MSGGNTSTRADNELVVSAFVHGSEPETGYDPMYGWGDRGEPLIQSTLMKMNRNMTYDNDLATSWSSNNNFTEYTVNIRDGVKFTDNTTLDAEDVAFSYNQAKSTGNTIDLSSLDNVSAINKTTIKFKLNKPDSTFTDKLLHVGIVPSDSYDNNTYGSNPIGSGPFKLAQWDKGQQVIFEKNPNYYGKQPKFDKLTISFQKNEASFNAAKNHELDIAAVPLSYANETIDGYHSFLSESNDVRGISLPMKNNTGETNEDGIALGNNVTADKSIRLALNYGINREDICKGALNGAGVPNYDGIAHFLPWYNNDSTIKDADIDKAKDFLKKGGWKDTDGDGIVEKDGKKASFNLYYSSDAPERQAIAVAVSEQAKEFGIEINATGSNWDEIDKIKFSEPVVWGFGSTDPYVMYGEYYSNQAGIGYNNPSLVNNSAVDSHIDKAMSEPREQSYADWSAVSWDGQTGISPKGDAAWLWISEIKYTYFVDDSLDISKDTFKLQPHGGDLFGNIYDWTRISPINATN

SEQ ID NO: 75754 - protein, 515 aa, Methanobrevibacter gottschalkii
GGPSTERADNELIVAAYSHGGEPEAGFDPILGWNYYSEPLIQSTLLKMTRGMEYENDLAKSWEANSDFTEYTVKIRDDVKFTDNTTLDAEDVAFTYNEAKKSGASLDLSSMENATAVDKQTIKFELNRPDSTFVDKFAYIGIVPSDSYNNETYGANPIGSGPFKFVQWDKGQQVILEKNPDYYGKEIKFDKLTILFEQNEAAFNAAKNKEVDIAAVPLSYANETVDGYNMHLMDTIDVRGLSLPVQNNTGKLSEDGNPIGNNITADKSIREALNYGVNRTAICKGALNGIGVPNYDGIAHLLPWANNESAIDDGDVDKAKDILKKGGWKDTDGDGIVEKDGKKASINVYYSSNAPERQAIAVTIAEEAKEFGIEVNATGSNWDEMDKIKNTDPVVWGFGSTDPSTMWSEYYSDQATVGYNNPALINNSAVDKHIDNAMKSDRESSYAEWSAVSWDGQTGISPKGDAAWLWVGEIKYGYFVDESLDISNNTELIQPHGGDIFGNIYDWSRVSSIEK

SEQ ID NO: 75755 - protein, 512 aa, Methanobrevibacter gottschalkii
SHDSDPTHLTVAAHSNIKEPEAGFNPLTGWGCGHQNYNPLVQSCLFKTDKNGSIVPDLATGYSVSGDGKTWTVNVRDDVKFSDNSTFDAEDVAFTFNTAKQTESELDLTNIANVTAVNNTCVKFNLVEARSTFIYDLRYLGIVPSDSYDNSTYGENPIGTGPYVLDHWDKGQQAIFKINDNYYGDKPYFTQITLLFPEEATWLELAKSGEIDVVPVATSALNQTVDGYQFIEKSAGRAQGVSLPYLNDTGIMYNGTMKVGNNVTADKSIREALNVGINRQTMCDEIFAGHASPEFTGVDTRTYANPDAKVADGDVSKAKQILKDGGWTDTDGDGIVEKNGLKASFDLYYPPDYLDRQSMSTVFAEQAKELGIEVKLVGADWDTIYKNLYSSAALMQQTSPDPYKSIYQQYHSKEMDGFYMNPNLYNNSASDRLMDEAMHTSDLNQADSLWSQSALVNGGGWGPAGDAPWVWIANYDYNYFIKDGIDIGKQPDGLGNDVLINICDWSRTNSTA

SEQ ID NO: 75756 - protein, 68 aa, Methanobrevibacter gottschalkii
DLSPIDPVNAYLKQAAVSEAQRQILQEYFGTNVPLTTKIFHWLIDLFQGNLGTSLIYRAPVVDIILEK

SEQ ID NO: 75757 - protein, 31 aa, Methanobrevibacter gottschalkii
AVYLGWFPIGFGVPIGVRSTDVTFAEWATRL

SEQ ID NO: 75758 - protein, 24 aa, Methanobrevibacter gottschalkii
EQVFSYPGIGQTAVAAGLQNDVPL

SEQ ID NO: 75759 - protein, 38 aa, Methanobrevibacter gottschalkii
FIRDIPTSFINANQMPSLEHLFGTDWMGRDMFQRTIAG

SEQ ID NO: 75760 - protein, 30 aa, Methanobrevibacter gottschalkii
TFLGFGLPPHEPAIGVILSESMNYLSSGYW

SEQ ID NO: 75761 - protein, 21 aa, Methanobrevibacter gottschalkii
PHILPAYGQYIITPIVTNINS

SEQ ID NO: 75762 - protein, 401 aa, Methanobrevibacter gottschalkii
SENLSTSDNPVVVDNVDMSSKNIGSIPDVTSASNDVVVSENSSVEWKSYENEKDDNVSDNQSNSSSNSTSNGSYKEESVVSNVVTKNVSSSYGTVVNYNIKVLDQFKKPMVGKTVSVTIGKKTVEKITDSDGMVTFTLNCQAGKYVIKYKVDNINGSNSYIVKNKISLTVLNWNLKGDVSKINLIKKNMPNNTWVKKAVAATKKGIPLLKFKGGKGKIVFMTAGVHGNELSSQVAAMKMIKYLSDNPISGTVYIMPFVNVKAIAKKVRYTDKDYNRIASSSGTIPNKIVKLVVKYKCNSYGDFHTTKPGGAPGKDIVMGSKSLKSKSADLTNYIAKKCKVNKRIYSHIGQEYPGALFENVNKKGITSVICEVALPHNTVTTKTVKTSFNMMKYLLKYNSVI

SEQ ID NO: 75763 - protein, 220 aa, Methanobrevibacter gottschalkii
AYVGTGFSHDIPTSKYHDLSASDILNKYNTTNCHVEENGVCTKVVDGDTIYLDNGKKIRFVGVNTPERGVEGYITSKNFVQKLCLNKKVGLDIDDSKFTDRYGRTLAVVIVDGKNVNEMLLKEGLAEIMYMPPSEFNPFEWGTTNTHVDTTHSSSSTTHTSTESTSSSDSAKYIGNANTGKFHTAGCSSVNHMSEHNKVFFSSRTDAINQGYTPCEICNP

SEQ ID NO: 75764 - protein, 127 aa, Methanobrevibacter gottschalkii
VYANNDSSSNSNRTILNVSSEGPIELSKITDDIKNNSYYEGYDVETLRWMESLGDKYVFKSNDEIVIMDKWDADKIPSAYVCDAYFREIFSCNVLENRTLGDGNHFKDVLFIKNVEFIDEEVHYIQI

SEQ ID NO: 75765 - protein, 12 aa, Methanobrevibacter gottschalkii
KLFNPSTITTPD

SEQ ID NO: 75766 - protein, 946 aa, Methanobrevibacter gottschalkii
EFNNASNTEDSNLMTDNVDSLSVENKLEVSNEDSISEANLVNSHDDNLNNYSDSDVLSNYEDDYGNVQASNYAEIGNTNSVRSDVLSVSNDDNLAASSKVSAKVDVVDTHYSKSATYFKVTLKDTKGNSISNQKISFKVNGVTYTATTDKNGIASVKTAALSVGTYTVAIKYAGSSKYAAVALSKKVKVLSSVSGSDITKYYGPVVQYSVKFWKNYNALANTKVSFKVNGITYTKTTDKNGVAKLPVNLAPGKYVITTINPYSGEKLSNKCISLRDGTTLTHGSTNTYITPNKKHSFTVTLKSKHGILIKNKNVVFKYNNKKVTVKTNSNGKATLSIPALSKGTYYISYSYSGDKYYSGSSGSGKLYVKNPTTKITSSKLKMQYKDGSKFAVKLTKNGKVLANKKVKLTFNGKTYTEKTNSKGIAYLTVPTVKPATYNIKYQYLTPSYFNYCYGSNKIVVSKQTAKVSAGDLVMNYKDGSVYKVVVKNKFGNPLKNIKVKFTINGKTYTKTTDSNGVAKQSIGLNIGYYSVKTVLSNNYYAHGAIYKHISVKGTKFVGGNIHVAVGKTAYYSVKLLDYKNNPIKSTEVTFILDGKKYTATTSSKGVAKVNLGVLSAGTHNVKYSQGEYSGSSNIYVADKVTIKQIIAASGNVQKYIQKNHRLPSTVNIGGVTYSTNQYLYLVSKAIVNLKSNVKSAIYVKNVDGPSNPSSTYAAGNLYDYLSVANSVVKNSDSKGSVPNTVSSKVGTIGYKSLVYAFARVVAFYGDDDRLPSFVEIKSLSGTSSDSNINSKNTISNLKAYLAASTNCQVNNAKIKQLVGKLTNGLKSEKSKATAIYNYVRDTISYSFYYDTKHGAVGTLNAKSGNCVDHSHLLAAMFRTAGLATRYVHGSCTFSSGSTYGHVWTQVLIDNTWTVADATSSRNSLGKIANWNTKSYRLNGYYSSLPF

SEQ ID NO: 75767 - protein, 28 aa, Methanobrevibacter gottschalkii
YISNITEKTQTNIQNLLKTERDFLINKI

SEQ ID NO: 75768 - protein, 33 aa, Methanobrevibacter gottschalkii; identical to SEQ ID NO: 70885

SEQ ID NO: 75769 - protein, 26 aa, Methanobrevibacter gottschalkii
PLYGLAPGAIDSFAQLRAVMAGSFGS

SEQ ID NO: 75770 - protein, 32 aa, Methanobrevibacter gottschalkii
GTFSILNGSDGLLAGIIPKFIQLATGGTFDFS

SEQ ID NO: 75771 - protein, 35 aa, Methanobrevibacter gottschalkii
QKIGVPILGHLQNGKAVDGIAWLLSTPNLTMFITE

SEQ ID NO: 75772 - protein, 28 aa, Methanobrevibacter gottschalkii
MFDIMGMIYGVLNTIFDPILAMDPNPSN

SEQ ID NO: 75773 - protein, 41 aa, Methanobrevibacter gottschalkii
SAIHDLVIILPTTVYWVTLTPLWHVIGSMFYGGQATIPYGI

SEQ ID NO: 75774 - protein, 222 aa, Methanobrevibacter gottschalkii
ADDDRSYSIDQVITDLTVKNNGLLHVEEQYDYSFDGAFNGVYRDIPLKSGESIENIKIHVDGAYATYEESDDDGYKHVKIYLYSDAAHTKGIKDCNVKVYISYDLIGAVTIFNDVSGLQYKLWGEEWDVGANNLKATVHLPGNNGNEYYLTPSEYNDTSSLKGNTITAESSYIPKGEYYELLVLMPVDDFNKSPNAKHVNQNGHDMIMKNLKNTINERDFWN

SEQ ID NO: 75775 - protein, 18 aa, Methanobrevibacter gottschalkii
IENKISIGHPNIKGFEAS

SEQ ID NO: 75776 - protein, 85 aa, Methanobrevibacter gottschalkii
SQENIESNTKDLMLTLNNKAGLSASEQIVFDTLNHFSTNNILNLSTLNGQLSSETNGKWFMEKIREWESSVENDMDVSRFFDDRG

SEQ ID NO: 75777 - protein, 58 aa, Methanobrevibacter gottschalkii
VPNISDYDNDGLFMYHYYGGYGMMNMAFSTGEISANPSDSSGFGGSGGGSGGGGGGAF

SEQ ID NO: 75778 - protein, 109 aa, Methanobrevibacter gottschalkii
YIPGRELDLPIVKNAELIATKIKKILQVNEDDDTTVNLINGGQQLLVQLPFERLNVAADYSVSTLQTSAATIQSIIDSFEINMFDASTIKTAVMGAYPRTVDLSGSNIS

SEQ ID NO: 75779 - protein, 20 aa, Methanobrevibacter gottschalkii
LGYGLRNIMANHVVAITNKQ

SEQ ID NO: 75780 - protein, 53 aa, Methanobrevibacter gottschalkii
ALSSIMEQTAMFETGDATGAFERMHLLTLAYQGLNANNLVFDIVKENGKGTVG

SEQ ID NO: 75781 - protein, 25 aa, Methanobrevibacter gottschalkii
AIEDKIIKVAKKMPSGYNMYEPIDW

SEQ ID NO: 75782 - protein, 26 aa, Methanobrevibacter gottschalkii
STVLYYNDMLEYETGLPGVDYGRTEG

SEQ ID NO: 75783 - protein, 29 aa, Methanobrevibacter gottschalkii
SHSIYGGGGPGTFHGNHVVTRHAKGTAIP

SEQ ID NO: 75784 - protein, 45 aa, Methanobrevibacter gottschalkii
LDAGTQMFSVQRTSALIGTVYGTIDNLRNPIPNVAKIAGEIKDKL

SEQ ID NO: 75785 - protein, 290 aa, Methanobrevibacter gottschalkii
LLGGGSDNVTIGYLPSDHDAALFVADAQGQYAKNGINTKLVQFNNGGDLMTAMASGEVDVGYVGITPVLSSIEKGVPVKVISAAQTEGSGIVVAKNSGINSVFDLEGKKIATPGEASIQHMLLQYYLKQNGIDIKDVKVSAMKVPSMNDALKTNNIDGMITFEPYVSIAEKNGAKVLVDSSEILPNHPCCVVVASDKFLDEHPNETQKILDIHKNATDYINNNTDEAAELLPSDIVSDVDVEKQALAGFPFISGLNDTYKQNVMEFMNLEVELGVLKKPLSEDKIFWNGS

SEQ ID NO: 75786 - protein, 299 aa, Methanobrevibacter gottschalkii
GLFDFLGGGDDTVKIGYLPSDHDAALFVADAKGMYKDNNITTELVQFNNGGDLMTAMASGEVDVGYVGITPVLSSIEKNVPVKVISSAQTEGSGIVVTDDSGIKSPADLKGKTIATPGEASIQHALLVYYLNQSDLTVDDLNVSAMKVPSMNDALKTGQIDGIVTFQPYVSIAANQSNAHILENSSEILPNHPCCVVVASDDFIKNHEDQAKTIVKIHENATKFINDNVKAGNADKIVKLLPEDIVSDANLEADSLASFPFISGIDNDFKADVDEFQALEVSIGLLNNTIPQDKIYWEA

SEQ ID NO: 75787 - protein, 850 aa, Methanobrevibacter gottschalkii
ENSSADLISDTQYENSVDIDVADDNLKSYQSVSSDLEDNNEVYNLKLNDNSQVDNTFLKDNASVSDSKIYKLGYDVTHVADKLLNFSSADDILVITTAGMAWIDNKTTESALGGIVDASNNYVSYGKGNILTLSSTRNDPTNIAFFIKKDNSLTMAFYKNGSLTPIFHGNAGPTLSAGEWKKLQKALGDEDAYSYISIANAWSAGMPNDVLTQATYHGHVCTGLISGQAMIQTLLTYYPPKDEFGLPLEHTAYYVLGVPGGSEDDAFTWSLDITPGKRAYIGIDTMVNKAMTGFIRWNTTSNTGIIIIMSYNETAIKESFKKVSGLNPDASATNDLKYQNWLISTLHTNPTSLVTILYEFKGLTKDNLEYLMGLEIGKGNVVKSAHGLDMNYILGLNLTKANREANVNIAEIKLSDAKLKQIGIDACNNAIEYFSSQGITISKDLNNLYVLTSAGYVRINGTPTSMVFDGIYEVLGSALYKKTLFPVHTPIWKDLVFDFYWVDPNNVTNDSSFSLKYDVAKDELIVIGNTTRNANYILQNAIKYDPPYDVLIGWLFHNHVCGGSAPGYLIADYIYENFPTNENESYIYLTTNANCKDDVISRVLGVSPGMGTYYNLRYDNNKTNSTNVGIAIKWNSKTKTGELIIINLDNWGSGAIFKKGSNMYEEYIKLYKKDYSSPNLISRPQISITARKEINEEMLNKIIGGATDTKEGNSIAYIMNLPDKLPINNGENNNKKDNKKTKITGNKKKTDGKHINNSSSSSNSIDSNSPTTGTYGKSNAGLSVGISKNIINANSNSESSDESSGDGKTYEISKKSPNKKINSNNAIFAILAVLVLGGIVGYGYIRKNRG

SEQ ID NO: 75788 - protein, 123 aa, Methanobrevibacter gottschalkii
HPGHGHYVDEITSEDVGHSNHPSSDSHDSSGKELSSKSSSNSRIASSHSNSKSNKVSSSDTSNSDLSNKHTSSQSIKSSKGDVEPINSQNEEMPNNTQVKNTSNITNHTITEEAENTNLLTQS

SEQ ID NO: 75789 - protein, 12 aa, Methanobrevibacter gottschalkii
LPQLANEFNLNN

SEQ ID NO: 75790 - protein, 18 aa, Methanobrevibacter gottschalkii
IMGNVPIIPEYFSLLTKS

SEQ ID NO: 75791 - protein, 128 aa, Methanobrevibacter gottschalkii
TANILINDNTPLENQAGTLKINNKTIHYEKSGKCLEVIDGNTIKVYGIGKVQLTQVGSPSSEAKDFVENNCLGKTVYLDIDDKKVEDEYGRALAIVYTDTVDVNKELINNNLSEISYFTPSEFKKGDI

SEQ ID NO: 75792 - protein, 20 aa, Methanobrevibacter gottschalkii
YYGGNPTYLWKVFIGEPSIT

SEQ ID NO: 75793 - protein, 12 aa, Methanobrevibacter gottschalkii
YINSTAIHSIYQ

SEQ ID NO: 75794 - protein, 31 aa, Methanobrevibacter gottschalkii
SFFKGWGADPNTYFATTLLQSSDSMNGLFTF

SEQ ID NO: 75795 - protein, 24 aa, Methanobrevibacter gottschalkii
TLPGSSIGLAELFNPDWSLLTHFE

SEQ ID NO: 75796 - protein, 37 aa, Methanobrevibacter gottschalkii
LGYMSLQSGTAVADLVTQGTGLVFIAYPTVFNVLGDW

SEQ ID NO: 75797 - protein, 102 aa, Methanobrevibacter gottschalkii
AIAYTSMHDDTSDNNNTTIKSCIPNITNATNDAPNATGDDKNTTSSEPYVVSEVVKFNAQQGEGYYREVTYSDGNFRQYDVDTGKLIGSSYDSDQDKLPSME

SEQ ID NO: 75798 - protein, 607 aa, Methanobrevibacter gottschalkii
TDTNSTDDVISSDEEAEPPSVVSQDISINEGNDSNPQENYTLKGSDVSMYYNSGSGYEASLSDGNDSVENATINLNINGVDYNKSTDASGKVFLIINLKPGDYVITASYGNLTTENKINVLPVITGNDVSTTYKHSVPYSATFLKSDGSPLSNTYVKFKLNGKTYSKKTNSKGIAKLYVGSKIGTYNIYAMHPNGYSISNKITVKNSIISSNLKKHYRSSKTFKATFYGKNGKLLTGKTIKFYTKGSYFYKKTNSKGVAYIKVISKPGTYKITSINTNTGEKKSNTITVLSTLEAKSMTVFTGTTSKFKVKLYKGENIAKNTKMTVYVDGVKKRVTTNSNGVATVKFKLDKGIYNIKSVDPFTGYVLNKKVTVKLASISAINVNAIEGKEGLFPAKLLQQNGKVASGTYMEMTIDGVKHKVKTDSRGIAGYKFTFKDAGVHTVVCKDLSTGYKVTKKINVVKKGEGKSYDQFGVSEDGKTMLVIGRPSASGETAKYGYTYYKTEVDRTCPICGSNELYWSIFWASGNTDGGTFPETPSRPAHYDEGNLDGIIICMHYTGDDEYCDADWSVFGHNHDGSGRDLKLVSKPVRSSEIEAYLLKSGYYVKV

SEQ ID NO: 75799 - protein, 15 aa, Methanobrevibacter gottschalkii
MITQFSTTYATGLYN

SEQ ID NO: 75800 - protein, 15 aa, Methanobrevibacter gottschalkii
YQIIAIYGAEYIEAG

SEQ ID NO: 75801 - protein, 147 aa, Methanobrevibacter gottschalkii
VSPVLIVAEDASEDNGIDMAATIGLTGFNWIYPGNSVNAQGQTLHNVYADYPDNPYGAARDIMSYTYHVTPHIIISINNDAAAAIFGENIIDDIRANDGYNGYAGNDKVSGSMDRGDAVGTAMAENGINIIEIPIQFLIGNISPHFV

SEQ ID NO: 75802 - protein, 34 aa, Methanobrevibacter gottschalkii
QFAFADLSFAGLIGIPKTLFMEGIGVGSLTGTIP

SEQ ID NO: 75803 - protein, 14 aa, Methanobrevibacter gottschalkii
WGGGWLMNIGAIDF

SEQ ID NO: 75804 - protein, 17 aa, Methanobrevibacter gottschalkii
AAPSINGVAGLFYGNPE

SEQ ID NO: 75805 - protein, 19 aa, Methanobrevibacter gottschalkii
LVSQSINPANVGIGVLGGL

SEQ ID NO: 75806 - protein, 21 aa, Methanobrevibacter gottschalkii
LGAQAVTIGGLGATAPGLGIG

SEQ ID NO: 75807 - protein, 12 aa, Methanobrevibacter gottschalkii
YKYMLNALHNFH

SEQ ID NO: 75808 - protein, 14 aa, Methanobrevibacter gottschalkii
KLIATIIGTGDALP

SEQ ID NO: 75809 - protein, 12 aa, Methanobrevibacter gottschalkii
KLPSVTGSCSHP

SEQ ID NO: 75810 - protein, 42 aa, Methanobrevibacter gottschalkii; identical to SEQ ID NO: 70549

SEQ ID NO: 75811 - protein, 22 aa, Methanobrevibacter gottschalkii
GKGDVIYETGILGIVVTTDSWH

SEQ ID NO: 75812 - protein, 17 aa, Methanobrevibacter gottschalkii
PHASTTFAKLFGITRGL

SEQ ID NO: 75813 - protein, 11 aa, Methanobrevibacter gottschalkii
PRLFAPESVDA

SEQ ID NO: 75814 - protein, 113 aa, Methanobrevibacter gottschalkii
IYNNTQPSHEDSLNLITDNGTVHKTASYPYKAVIEYEGSWGAKMGDPNYLVSEDGYGTKSFVLDCAAWDRVSISAQKYDYGEGELHVKLLRNGEVVAENSTTNVTGAVVVNYN

SEQ ID NO: 75815 - protein, 262 aa, Methanobrevibacter gottschalkii
TDSNVVITYGETTYSNSNYKSFVDNFFVNQANVDINNVGVKTITADQVNQVSSGITGKSYNSNQILSSALVDLNDNGNLKVSVDKSKITTITGDMYISALKSAGITSGHVYVTSPVQATGESALAGIMNSYEEVTDVQIPDSVKEAANDEIYTQAEIVNNSGVNADDLSNLVNQVKDEVSGGNVTNHDEIVNIINSHVENNNINITNNDIENLADSIEQVQNVQGDVNYYKTQVNEFLDDNSTGGFSLDGLFDWIKSFTDGI

SEQ ID NO: 75816 - protein, 31 aa, Methanobrevibacter gottschalkii
GVISILSSIAPFGSSNSISQTSTSSYAQSVD

SEQ ID NO: 75817 - protein, 126 aa, Methanobrevibacter gottschalkii
SSPDPIKLGDIKNDDLVITEVGQNKLNFEYSVEVDISDLSSEDKKLFEKALNNNNTSFILNLTSSTPTKIAITMHSLPKKAEIIGNTLYIKNNNMFRLINGIQLDNLKISAVSFNTTSGQLFIARK

SEQ ID NO: 75818 - protein, 118 aa, Methanobrevibacter gottschalkii
ALYQINAENSVIVGNLSQNITNDGYGYYNGYVTGDIKVDSSFDYLCVNVNFLDNNGKVIDSTIGWNDLNPQSGKTYKISAWYFEQQAPEKAEISVVDSADSTTPLYTENITISTSSGV

SEQ ID NO: 75819 - protein, 113 aa, Methanobrevibacter gottschalkii
CVCASMTGQISILPNDNESESILDNLSAITNDTGNSGQSYGSKDYSSSSSSSSSNDDSQVETTTDHSGDNQGDSQKDSDDHDHENSNQNNKDKDTKTDSGHAGQGSGDANDFD

SEQ ID NO: 75820 - protein, 17 aa, Methanobrevibacter gottschalkii
SWANPLVQTHSYFYFNT

SEQ ID NO: 75821 - protein, 17 aa, Methanobrevibacter gottschalkii
AKDYVANTIPFVPFRIS

SEQ ID NO: 75822 - protein, 21 aa, Methanobrevibacter gottschalkii
FYPNAESMAHKLFGLIQINDF

SEQ ID NO: 75823 - protein, 14 aa, Methanobrevibacter gottschalkii
MVELKDIAQENEVD

SEQ ID NO: 75824 - protein, 12 aa, Methanobrevibacter gottschalkii
SNAKIRQRSDDT

SEQ ID NO: 75825 - protein, 23 aa, Methanobrevibacter gottschalkii
TFSITPEQTLKFEEYFNKFANGE

SEQ ID NO: 75826 - protein, 14 aa, Methanobrevibacter gottschalkii
AQKAIVEPDDSYFA

SEQ ID NO: 75827 - protein, 13 aa, Methanobrevibacter gottschalkii
GLSGAMLGVDAGG

SEQ ID NO: 75828 - protein, 29 aa, Methanobrevibacter gottschalkii
KFIDAVIKYSKLYPSASNVFHLSQLPAND

SEQ ID NO: 75829 - protein, 34 aa, Methanobrevibacter gottschalkii
HPIFLLGELMNINVELFYLFNHAFQNPFFDYIMP

SEQ ID NO: 75830 - protein, 29 aa, Methanobrevibacter gottschalkii
IHEPRPFLSLDNVHLLIAEDDPLSFPSGH

SEQ ID NO: 75831 - protein, 11 aa, Methanobrevibacter gottschalkii
VASLGEAAISG

SEQ ID NO: 75832 - protein, 19 aa, Methanobrevibacter gottschalkii
LIGILFGQIEVDVWQNADK

SEQ ID NO: 75833 - protein, 11 aa, Methanobrevibacter gottschalkii
STFGTMAIAAN

SEQ ID NO: 75834 - protein, 17 aa, Methanobrevibacter gottschalkii
LNIYNLSAKTAAMTSEM

SEQ ID NO: 75835 - protein, 16 aa, Methanobrevibacter gottschalkii
LNINFLNIFPQLSVYP

SEQ ID NO: 75836 - protein, 12 aa, Methanobrevibacter gottschalkii
MMLIIKNIFLVI

SEQ ID NO: 75837 - protein, 113 aa, Methanobrevibacter gottschalkii
PLAENSIRNTLDVSDSLNVKSDLSKIANAIKQVYGEGQGSRQTIKIESNKKLKINIANSHVSTSFKLKSNSKKDIKEHVMSNIGKTTISLNKGENVIIVEWPVNSKNMLIYTV

SEQ ID NO: 75838 - protein, 173 aa, Methanobrevibacter gottschalkii
LDPIYDELPNVASVIEKNMPNNEETLYLDLSSSINIDDLKNNLSATDGFISFDEKSVNIPMWTFNEREHNYFDEIVGNIDSNYKAYNISTSEIQITLADNYTSAQALKSFSDWYKLVYGETISYAQVHAVLVVDSSSLDTFEHILLQKGIVASKIEGPIQDTVNNTNSSMLTN

SEQ ID NO: 75839 - protein, 12 aa, Methanobrevibacter gottschalkii
LQKNLYIIGNYT

SEQ ID NO: 75840 - protein, 212 aa, Methanobrevibacter gottschalkii
IVSSMMNTPDNVYNITNVGHNANGTVYKIEAGNMSSNETVGLILGVHPREHEIHEAVNNTIYNITSENGTNNLTKKYVIYYIKTKDNLTSREDTRPAGEELANKFIVPNIVKDKPFIVLDVHEINPDYEYSNFIFSLSNRTNTVDSYISHIANDVNLVDYQFSEGTSPEKVTKPIASKGVTTLLMETSITDALMEKQKTADNLIKSLDSLEP

SEQ ID NO: 75841 - protein, 198 aa, Methanobrevibacter gottschalkii
TGFIGGNDVETTPFKMSFMEGSFIGNVSLENDKEKFMHSYEDKENKITYNISTVDNSSVLMEIYQIQGLGNPEVRSFNGNEWNIYFTQAVPNNNSSTNSSNGDDAMNIIIGESQGKKQGYLIYMIIDGKSKINATGKMYGEAYTNYFEPLLESLTLKESKNVPHIYDEFGLTKEQFDYQIDLIRQYKSGNTSALQGAQ

SEQ ID NO: 75842 - protein, 367 aa, Methanobrevibacter gottschalkii
ATNAPYTAQSVADEYNLPIGQSMFENQSILGQQDSISVPLISNVGFLQHQITALDIQGLLMTLTTGMVPFDFSTVSSEGIDSYGDVVNVEGPGFLTFEGDKLAVKSPNNYVWGYSTPYKWLVKTDTGVDVVENGTVVKSVPENEIKNLDYHNDYYNSSTIRSWYNYDAHNGSTFTLEKGMKGFSDGRNNISAADVPVIFGHDVVDYASEYPTGSPILLYSGNYTEEDGEAYGTSLGSHAEYGDSIREVNARQFVDAWNGTVIPPNSTSSGKDYVYFESAVDPTAPGGSAAHGVCPPARALRAAVTAEGFGLPVGMTWDEDAVLFGYNPAQDITVTNNHDYPVLIKMWTEGEGTGMGIYCQIVRYIPK

SEQ ID NO: 75843 - protein, 13 aa, Methanobrevibacter gottschalkii
VLFSSQAEFTHPF

SEQ ID NO: 75844 - protein, 99 aa, Methanobrevibacter gottschalkii
RVSGMTIFSPLLRLGRIEQYSLSSIKMVLNNIQLIGHNANASYWGADGTAFAEGYITLPMQLILFFGLPFPLFFGVLVNQKDTIDYMLPGIFGWGFDFG

SEQ ID NO: 75845 - protein, 11 aa, Methanobrevibacter gottschalkii
FPTNMDYLTSP

SEQ ID NO: 75846 - protein, 20 aa, Methanobrevibacter gottschalkii
FIGFTYDNLVQASVQVGFPW

SEQ ID NO: 75847 - protein, 12 aa, Methanobrevibacter gottschalkii
AFNFSHVFYIES

SEQ ID NO: 75848 - protein, 105 aa, Methanobrevibacter gottschalkii
FYSSSLINSSINIEDSVSHRIILNDVSCVISQVNSNGVGYSKYIKLPSDKGYFEITVDKSKLTIEYDNKKGETMLPLLNMDSKYKLISGRGYYISKSDDGKIVIT

SEQ ID NO: 75849 - protein, 138 aa, Methanobrevibacter gottschalkii
VFISDENELNIAMAAAHSGVIEGLATSSSGIYPADAYSDYSNSKMNVLEPYSVEIVNISYTELGGDNNYDKKQIQFKVYAKTSDRFNNKELTSIGDRINYNLRKSIAVSFNSINATNKLYNPVFSPHYVYTTANVKWV

SEQ ID NO: 75850 - protein, 886 aa, Methanobrevibacter gottschalkii
ENSTDINLELNHNNDECIKEISDESSTDIDLKINYEYGDEINPEISISHCNNNMNYTKNIIHSNNYRITMNKLNDGAECSVSVSALGYITQIQNITINSQSNKTTIFNLKATDIYKMGYDMTKSADRLLNFSSADDVLVITTAGMTRINDITTENALDGIYNAADGHITYGKGNLLTLHAIRTDPTNFAFFIKKGNRLTMAFYQNASTTPVYTGIGGVGLTTNQWKKLKGLIGADDAYTYVSIANAWNAGLYSDILTLASYHGHVCTGLISGQAMVTTLIKYYPPRGETGAQPLENTAYYVLGVPGGSDDDAFTWTLDITQGKMSYIGFDTMENKNMNGFIRWNSSSNTGLLIIMSYDEAKIKNTFKSLYPNINPDNSVTEDLIYQNWLISTLMSNPESLVTIEAAYKDLTLEQKNQLIGNQLWSASNITARGLDLDYINSLNLPDAEMETGIFNNVHLSDSQLKQIGVDASLKAVDYFKNINVTIEKDMSNFYVLTGAGFVRINDTATSMVFDGIEDIFGARLSRGNLLPVHTALWKDLIIEFYWLNTSDIYNSVTYSLKYNSTTGQLYECSQQYNIQDRSLRYDPPYDALMGWLFHNHVCTGSSPGVLLADKIFDDLPLGENESYVLVSTYTYCKDDMLSRLLGVSPGMGNYYNLAYSNSDVNAGALWTADSDIIIRWNSETNTGTATIIKFGYPIFKDGADEYAEWMRFVKGDYSSENIVSLPTLSFEVTKPITRDDYNKIISGKSDDEGINVLSYIRALPDKIPAVLIDNNGISNGNDGNSINKYPKKSNNNSANTNSIFSSSNNYNSPSKGLNPNVGVSSYSLSGDSDVEDKGEASSNGKSYEVSKTPATKSIDSNSLIYALVGVLAIGILIGLGFMKRRK

SEQ ID NO: 75851 - protein, 23 aa, Methanobrevibacter gottschalkii
MPGVLESKTLMNFLQIKEMLYHI

SEQ ID NO: 75852 - protein, 1323 aa, Methanobrevibacter gottschalkii
EESMDNTTSNDDVLTSDSHDDVLTLNSNDDILTSSEKTWYVGKNTTVGGSGTQEDPFNNIELALNHSSSNDTIYINPGVYDGPHNTNLKIDIDNLTIKAKPNSVLLNANINNTRVFEVTGNDVSISGLNFSNVYMEYGGVIKWDGNGGSLTDSTIKNSKSRVGSIRWEGNNAIINNITILNSTSENGILVISGTSSNITNSTIRDTKGYYGAVMFGGKFNIIDNCTFINNTAWMNGGGVYDWGANNTVSNSLFIANNGTRGGAILTYENQPNRMNIINNTFINNIGGQAGAIVVRRAGANIDNCTFINNSAGSAGAVLILSEANITNSIFENNSASTVGGAVYITGDGSTIDNSIFINNTANNDGGAIYWSGENGTVTNTIFINNTVNNGTGEAIGYINNVTLNNVTLVNNNIEQVIVNESTPTFEYVFKLTEGYSNVKLTDNYTAFCTEKTKWSSSPRTPLIPHNDLSILKNHITGESVAEYLKILIYKYLKDPDRIRNLQQKIWIFTDDNYIDSTDSIIKEVISDYNSGFRIPNQGFSEIINDTTVLRIDFKSYNITKQIQNMIGFKSSIENITYNMSVVKNTLTPAVILGNQTTFEIKVTNTGSYYLTNVSVIEDGYDGLIYNSFSDPSGKWIFSRNSDGKPMWTYNGTLYVGISYSFNVTFNTTKTGNFTNFVVVTSNETDNKTTNNTTKVYKPDMTVEKLSLNRTVYVGNQTVFTIVVRNTGDCDLGDVFVVEKAPEGLVYNSFKGTDWSYNNGKFTYGKVLKVNESVSFEIVFDAVSPGNWTNVVVAGSNETDNKTGNNTTKVYKPDMTVEKLSLNRTVYVGNQTVFTIVVRNTGDCDLGEVFVVEKAPEGLVYNSFKGTDWSYDGNKFMYGKTLKVGESASFDIVFDTISPGNWTNVVVAGSNVTDNKTGNNTTKVYKPDMTVEKLSLNRTVYVGNQTVFTIVVRNTGDCDLGEVFIVEKAPEGLVYNSFKGTDWSYDGNKFTYAKVLKVNESVSFEIVFDAVSPGNWTNVVVAGSNETDNKTGNNTTKVYKPDMTVEKLSLNRTVYVGNQTVFTIVVRNTGDCDLGEVFIVEKAPEGLVYNSFKGTDWSYDGNKFTYAKVLKVNESVSFEIVFDAVSPGNWTNVVVAGSNLTGNKTGNNTTKVYNPGLKVEKITLDPVVSVGEITSFEIVVRNTGDCKLGDVFVHEDSYEGLRFHSFRGDMWKQKGDTFYYQGVLNPGESVSFVILFTTLKPGNFTNIVTAGSNVTNNTTTENKTKVIENHTNNNTNGTNKTVNNETKEVNVHKVDTSRATGNPLLALLMVLLMISVTSVRKFKK

SEQ ID NO: 75853 - protein, 240 aa, Methanobrevibacter gottschalkii
AYSLFTQNQVQYQTIAVSNATTMEVPVSKNSTFFNDALGIKYYQDDKSGVQVISWNGQEQASAKGAVNIASQFEKQKAGTTQSIENGVPVYENKKLRCFIIEVKNATTNDNIIIVAKDKNVALHMLKSIKFGVSNITNAAQVEPYAESGGNHLNDNNDTVFVFYPWYVYDEGDYDAYDDYSSRDSEYADDSYYDYSSSDSEYADDSYYDYSSSDSEYADDSYDEEYDESDEDYESSEDFN

SEQ ID NO: 75854 - protein, 91 aa, Methanobrevibacter gottschalkii
AIDSANWTSADVGYETFKIPPQYENPYSSDFDMYEFDEDIDVFTIRYVNPNLMDLYGHFLNEYHGKKVNVAGHDAVHFTYYDRHDKTNNSV

SEQ ID NO: 75855 - protein, 49 aa, Methanobrevibacter gottschalkii
WFSAGEEFYYINWIGSNITPAIKEVVKSSLKSNYTHKEFYSILNDNIKI

SEQ ID NO: 75856 - protein, 90 aa, Methanobrevibacter gottschalkii
AYTMFNGNTHLNVTDNTTGIDNSTGIDNNTTVVGDNSPLENLTNNNTTYKVYNPQSDSYVPVIGEKFDEEVNRWYTYDDQGVRYYNTRIN

SEQ ID NO: 75857 - protein, 12 aa, Methanobrevibacter gottschalkii
PKILNPDATSYT

SEQ ID NO: 75858 - protein, 25 aa, Methanobrevibacter gottschalkii
KNISTSLNKTQNKTLINNETYKKTT

SEQ ID NO: 75859 - protein, 20 aa, Methanobrevibacter gottschalkii
NVQGATSYIKVIKSTTKVYA

SEQ ID NO: 75860 - protein, 17 aa, Methanobrevibacter gottschalkii
SKYNIYSIKTNSKGLAT

SEQ ID NO: 75861 - protein, 17 aa, Methanobrevibacter gottschalkii
SKILIKKTIPKKIETLT

SEQ ID NO: 75862 - protein, 54 aa, Methanobrevibacter gottschalkii
TIKLTDDYNDIVKKVSIKVNIYTGKKFKTFKITTNNNGVAKLKTDKLSLGTHNL

SEQ ID NO: 75863 - protein, 69 aa, Methanobrevibacter gottschalkii
ITLVKTIIHDDIKTLVLKNITYYQTKDGKFNAKLGWYSKVGSSYQILRKTNENYNIISTVKSNSSFTTF

SEQ ID NO: 75864 - protein, 40 aa, Methanobrevibacter gottschalkii
NLKAEITWNKVEGATKYIIFRKIGRDANFKAIGIVNSNVL

SEQ ID NO: 75865 - protein, 15 aa, Methanobrevibacter gottschalkii
PKQLRSILNSNTFVD

SEQ ID NO: 75866 - protein, 16 aa, Methanobrevibacter gottschalkii
SLKDNEIKWGKVPNAD

SEQ ID NO: 75867 - protein, 12 aa, Methanobrevibacter gottschalkii
TITLKLNNIENS

SEQ ID NO: 75868 - protein, 94 aa, Methanobrevibacter gottschalkii
SPYKSNSNKHIFSIPYRVGELLGCVYYNPSIPGSTYHDLGQKDGKNIENTKYYRYRICREVVDQISIGELPGNWKELDNLKNSEGITNTYIDDY

SEQ ID NO: 75869 - protein, 101 aa, Methanobrevibacter gottschalkii
YLDNSILGSINSVDTHTFNGALNHILNKIETASKTRVERGESPIKVIFVDLCYSDRAYDKTIKENRDVTKNKIGLTLNDYQNALNKQYNKWKNNNFLTLYN

SEQ ID NO: 75870 - protein, 20 aa, Methanobrevibacter gottschalkii
KTRDYNIVNQENCPYTTSDN

SEQ ID NO: 75871 - protein, 18 aa, Methanobrevibacter gottschalkii
SKFTYGQYGNAFASFLKE

SEQ ID NO: 75872 - protein, 107 aa, Methanobrevibacter gottschalkii
AYISLNTQETKVDIITQNTIHNGDIITVQLKDLYRNGIPNQAIDLKILDDSGWAHNYNATTDELGIGQIQILGLENGNYTAHAKFNGTLFLKESANHVSFEVTDGYF

SEQ ID NO: 75873 - protein, 20 aa, Methanobrevibacter gottschalkii
FEGQVATVANFIKMYFDSNF

SEQ ID NO: 75874 - protein, 18 aa, Methanobrevibacter gottschalkii
YTITMCILKNKLLYYKYE

SEQ ID NO: 75875 - protein, 13 aa, Methanobrevibacter gottschalkii
LKYEYKILFTFNP

SEQ ID NO: 75876 - protein, 248 aa, Methanobrevibacter gottschalkii
GLFDFMGGSDSSNDDNTFVVGFDAEFPPYGYKDDSGNYTGFDLDLAKEVCERNNWTFKAQPIDWDAKDVELDSGSIDCIWNGFTMDGREDNYTWSNPYFDNKQIIVVKSNSGINTPADLKGKIVETQKDSSALAALQGDNKTLADTFGTLTEVADYNTAFMDLESGACDAIAMDIGVAEYDIKNKNATSDYQILKESITSEKYGIGFKQGNTDLKDKVQSTLDDMFKDGTVAKIAQKYGISEDALIQP

SEQ ID NO: 75877 - protein, 12 aa, Methanobrevibacter gottschalkii
MILSNVIGQLLG

SEQ ID NO: 75878 - protein, 11 aa, Methanobrevibacter gottschalkii
VFGMSLSADYR

SEQ ID NO: 75879 - protein, 19 aa, Methanobrevibacter gottschalkii
IAIPEMFTVAKQIAAADAS

SEQ ID NO: 75880 - protein, 14 aa, Methanobrevibacter gottschalkii
LFNFNVGNLVPLTD

SEQ ID NO: 75881 - protein, 11 aa, Methanobrevibacter gottschalkii
VAGLGADALAA

SEQ ID NO: 75882 - protein, 19 aa, Methanobrevibacter gottschalkii
VPILQFMGAGDTIQYAMDY

SEQ ID NO: 75883 - protein, 12 aa, Methanobrevibacter gottschalkii
VLAAGTTAVAVY

SEQ ID NO: 75884 - protein, 21 aa, Methanobrevibacter gottschalkii
PIATIFSYTAASASLSPQIAT

SEQ ID NO: 75885 - protein, 149 aa, Methanobrevibacter gottschalkii
YIGFGNHNDDGQTQVQNNASSSPNPVQSTQSSQPQQSSSAQSAAMDILGGSFSTGSSLSAKTYASIYVGSQHSGEKVIIQIKYSRDGSSLNNGNMVPKTVDSSGYINVKSADSFKYYPDFAEINLFDTNKNLLDTQSVSLSPDSSTQTF

SEQ ID NO: 75886 - protein, 126 aa, Methanobrevibacter gottschalkii
LNGLNNSIHVGDSYFSLPEGYVEGNIVKYNDVNITNGTTSLRIIEYNDNNIQEHIDKYVNYSTNHNYSTKINNFNVDGMNVYKSEIIQNNKTFHYWFIKKDKVYEIVTWDGNSYTDNTVFNLIKSN

SEQ ID NO: 75887 - protein, 39 aa, Methanobrevibacter gottschalkii
FYPMDIIPEPYHQYMILNPIFWIIDQFRHMTLWQSMPST

SEQ ID NO: 75888 - protein, 23 aa, Methanobrevibacter gottschalkii
TGMIPADAITNYQQLIAGNMTLP

SEQ ID NO: 75889 - protein, 11 aa, Methanobrevibacter gottschalkii
LQIIFRTTAIG

SEQ ID NO: 75890 - protein, 14 aa, Methanobrevibacter gottschalkii
DDKFLKESYKEYYS

SEQ ID NO: 75891 - protein, 56 aa, Methanobrevibacter gottschalkii
NFNNAIGISCSDVYIYLINSLYYTGEKVNITNFIHISPVVCFLTSLFFRVGFVDKL

SEQ ID NO: 75892 - protein, 59 aa, Methanobrevibacter gottschalkii
MGNGRFDAASQMANGVKGTNGELTDPAYNPDSSYYFMNYINYISNSHTVFEINPTLYSP

SEQ ID NO: 75893 - protein, 97 aa, Methanobrevibacter gottschalkii
FTATVEPTDKYMSPEEISNYIIDSNPDYENMTIGVYNIRPYSWWVGSNTIGIPSSHQSEIEQSNISYYIVNKPMDNLTNFTEIKNINELYLYKNNNF

SEQ ID NO: 75894 - protein, 56 aa, Methanobrevibacter gottschalkii
NFNNAIGISCSDVYVYLLNALYYTGTNVHSIDNIFLSPVVCFLTSLFFRAGFVDKL

SEQ ID NO: 75895 - protein, 61 aa, Methanobrevibacter gottschalkii
GMGNGQFEAGSQIANGVKGTNGELTDPAYNPDISYYLTNFPNFISNSHTIFESNPVLEYPT

SEQ ID NO: 75896 - protein, 97 aa, Methanobrevibacter gottschalkii
FTATVEPTNKYLATEEISNYIIDSNPDYENMTIGVYNIRPYSWWIGPNTIILHADAPGEIDQSNVSYYISQSRIDNLKNFTEVKNSGGLHLYENNNF

SEQ ID NO: 75897 - protein, 12 aa, Methanobrevibacter gottschalkii
AYSLLTMDYEKD

SEQ ID NO: 75898 - protein, 98 aa, Methanobrevibacter gottschalkii
SNFSADVQTDDSDVTDGGSGKPNVTSVSGDSEYYVMPVANLHKVTVNGVDKSDTILNSAVGVQANVIDNGKITIKPGEIDITTPDGVSPDKAVQRPQL

SEQ ID NO: 75899 - protein, 21 aa, Methanobrevibacter gottschalkii
MIIESIMPFVDGIVDIFTQGG

SEQ ID NO: 75900 - protein, 15 aa, Methanobrevibacter gottschalkii
KSLGVHPDSAAMAEG

SEQ ID NO: 75901 - protein, 299 aa, Methanobrevibacter gottschalkii
YEPAQEELTLAKTTKLNELHEIYNGPLTTSQNSILLENQINDGKTPEEIERINILTPATKDWQSFHKKSIYTNKDKYNRTMAIYSNESKNIILSTTKAIKIVNENNAEVLSKIKFEEPNTVSVPILISRLQAGAGLVNVGSVVDIYTNNNNTNENYTPNNTSPNISGCTVLAIMRYEDNGEIDSKYSKSNTIIKGNHTNPKENTKEFSSDVLELIKGSIINGYDEEKTIEILKNYGIKLSNYERQINLGDLNAQYMLLIETPQDKVEYVINNMENIILTIPTTKAPNWMVNEISSTYQD

SEQ ID NO: 75902 - protein, 153 aa, Methanobrevibacter gottschalkii
GEVNYFSSKIAVERNIDSPTILIPSIGVNEKINNVSLNQGVLSDPGENIPTKDYVALYGHRTLQGSPFFRLNELSIGDSILLEWPGVGELNYTITNTTIVPGTADVPIGGNDSLFLITCDPIGSTANRIIIEGTLEKQNPINNEIIKENPQES

SEQ ID NO: 75903 - protein, 19 aa, Methanobrevibacter gottschalkii
NPIPSEIIYEKIIFLNGGL

SEQ ID NO: 75904 - protein, 17 aa, Methanobrevibacter gottschalkii
LSSTYPTFMDAVFAIRN

SEQ ID NO: 75905 - protein, 25 aa, Methanobrevibacter gottschalkii
GTCPTSAIEVTPNAIVHCDTCGEEP

SEQ ID NO: 75906 - protein, 12 aa, Methanobrevibacter gottschalkii
LKVEEYEIAEGI

SEQ ID NO: 75907 - protein, 21 aa, Methanobrevibacter gottschalkii
ACPGDFIAANSSSLTVAIPSV

SEQ ID NO: 75908 - protein, 24 aa, Methanobrevibacter gottschalkii
PTEAIRVVTKTGMSCPALVETDAE

SEQ ID NO: 75909 - protein, 20 aa, Methanobrevibacter gottschalkii
SNDALKVEQYEVTINGEAVA

SEQ ID NO: 75910 - protein, 13 aa, Methanobrevibacter gottschalkii
DCIEACPYDMIHK

SEQ ID NO: 75911 - protein, 13 aa, Methanobrevibacter gottschalkii
DTAINQSSFVSDP

SEQ ID NO: 75912 - protein, 13 aa, Methanobrevibacter gottschalkii
IPINGTALHVFPL

SEQ ID NO: 75913 - protein, 15 aa, Methanobrevibacter gottschalkii
PSKVFIPLFMKIFGG

SEQ ID NO: 75914 - protein, 730 aa, Methanobrevibacter gottschalkii
SEISADDTIGLADDGSDVVMDDKPIEPSNPTTPHKVDTMIVSSDTVSINEKEKIKSIDLTVNDTNKSKVIAGITVKNLTVKEGTKTIKFDYNNSKVIIKDALVLGKHDLLVSYLGNENYTNSSKNIVLTIFGNYTIQAPTSVDVNSTKIVEVPINVTNGIDPKELVKDDFNVTLTYKDGNITKAINITDFRIINNTIIFNYPLSRNITTSTITLVYTANETVKSKNVTINRIYNVKIEGINTKNQYKNGNFTFRLTDIDNATENLTGFKLNLLIGKNVINQITGTADKNGIVNFKTSKIFGYDFNNNTIVIKYLNVGNNTVELKSGDNVKLTTNKVNLTIEKAKINITIDKYNEQYGSNKNLTITVINADNGEPVPGIILHLNMPQTAGKNYYIQTDTNGIGIISVKGLIPGKYNLTVSNNDTVNIINNKASSKIIITPKPVTIKITSGLTINYNTGNTAAIKVTDKKGKGVSGAYVLVQLYTGSKSANYLFQTDKYGNIKFKAPLSVGKHKIVVSGAVGYSSSKVTKYIKVKKATAKISAPKVTAYYKQGKYFTIKLINTKKSNAPIYAAKVDIRVYISNYKYYKFNGKTGVDGKLKLSIDLKPKTYKVEVRGADSKNYAASKVVSKIVVVKAPTKLYPAKLTAKKGTNKYFKVTVKNTKTKKVIPGVKVKIKVYTGKKFKTYTVKTNSKGIAQFNVKSLSVGKHKAIVSSANKYCIAKSAKNYIKITK

SEQ ID NO: 75915 - protein, 60 aa, Methanobrevibacter gottschalkii
YELSSVASTMLASSSTADINESILKLITYLHIDVNPNEISQSIISSFETIASYVMNYGVS

SEQ ID NO: 75916 - protein, 155 aa, Methanobrevibacter gottschalkii
AQEDNSDITMMTLSKGGIVIHYPSNWGYSQSDSNYSIMSISKLDSVDSAGVGQVNINFEKKAIEGDFYTYLNNTYRSMQRDSSFNLTSSGEVMVSNIHAYEYMYSSNQNGTVKEHKAVWFEKGGQAYVMLYSAPVNDFEDNLYVFDYILSDIQIT

SEQ ID NO: 75917 - protein, 112 aa, Methanobrevibacter gottschalkii
VFNLDFNNISETSTVAMVHDTAFPDITEDIKNTTKTTSSSNTNYSSTSYNVKTTEDSSSDSDYSDGGRNSGSSDSTYSGSDSGSGSSGSDSGSGSGSSSNSGGSESNGRSDE

SEQ ID NO: 75918 - protein, 31 aa, Methanobrevibacter gottschalkii
SFTKAWGANPDTFFASNVLQATDSISGIFQI

SEQ ID NO: 75919 - protein, 24 aa, Methanobrevibacter gottschalkii
LTLPGASIGYTQIFTPDWNALTNL

SEQ ID NO: 75920 - protein, 36 aa, Methanobrevibacter gottschalkii
GFMALSTKIPFDQLVTEGTGLAFVVFPQVFNTMGPM

SEQ ID NO: 75921 - protein, 24 aa, Methanobrevibacter gottschalkii
TAARSIFLKDIVAFQQVHGPFLFT

SEQ ID NO: 75922 - protein, 35 aa, Methanobrevibacter gottschalkii
SGFFLYNVGTDLLNVVPPTIQNVLHYPDVTNAGII

SEQ ID NO: 75923 - protein, 34 aa, Methanobrevibacter gottschalkii
HLSSMINAGVSNIYNVLGTKIAPNMVTVVIFDFR

SEQ ID NO: 75924 - protein, 31 aa, Methanobrevibacter gottschalkii
NYGLHYFGGYEPILDNVTNVVYHPAITYSFT

SEQ ID NO: 75925 - protein, 24 aa, Methanobrevibacter gottschalkii
LTGSVNITDIVTAVHNGLVNAKSP

SEQ ID NO: 75926 - protein, 14 aa, Methanobrevibacter gottschalkii
LIIHGISSFVGGIL

SEQ ID NO: 75927 - protein, 30 aa, Methanobrevibacter gottschalkii
GYKAGGVVPIIMPGMDTSWFASNAAYPLPF

SEQ ID NO: 75928 - protein, 13 aa, Methanobrevibacter gottschalkii
SSLFKLFEMYIKY

SEQ ID NO: 75929 - protein, 29 aa, Methanobrevibacter gottschalkii
MHLNIIDSIYYSIITMATVGYGDYTPHTG

SEQ ID NO: 75930 - protein, 14 aa, Methanobrevibacter gottschalkii
VGIEDIIDALNVAK

SEQ ID NO: 75931 - protein, 32 aa, Methanobrevibacter gottschalkii
TNMPPIDAIFESMSALTGTGVTMYTNLEILPH

SEQ ID NO: 75932 - protein, 33 aa, Methanobrevibacter gottschalkii
GMPLFDSLCNTFCIISTGGMNVKNANMGYYHND

SEQ ID NO: 75933 - protein, 34 aa, Methanobrevibacter gottschalkii
SNIVPMELLFTVVSAITTTGASISSSLTMASWPS

SEQ ID NO: 75934 - protein, 31 aa, Methanobrevibacter gottschalkii
GHDPFDSLFATVSLQGNNGLDLGIITNQIHP

SEQ ID NO: 75935 - protein, 39 aa, Methanobrevibacter gottschalkii
FYPMEIVPAIVQRIFTLNPVYSAISCFRECISYGIFPNT

SEQ ID NO: 75936 - protein, 147 aa, Methanobrevibacter gottschalkii
STTVGNAITVVNKTVVTLPNEFSIESRETGYGTLINKNTKEKITIKDLGKGNLALTKFKNALTDLTKNPDIDHVKNSTSNINNITAYKIDYQDITKENNSDLSNVYVFTCNHTFLIKLENYNNNVKSDNDLDYVITHMTPDFKQSQD

SEQ ID NO: 75937 - protein, 1149 aa, Methanobrevibacter gottschalkii
ENDVAVSNDVGIVNETVLEVSSDDSDLSEADVLETQTNVVTKDTFHNYFGNDGTLLDNVSSDELIFKGDFTGIDVSYMTIGKSVKLSGGNTTLNNVTFIIGADNVVIDGFVLDHSDVYLFDIENVNGVTLSNNIINFKTLEGTEGYAIFANTVNDFKIINNTINYVGNTKGTMVNNAIRVTGDEDSAIASKKIIVEGNVINIKIPSVDVGYDPVTWESKVFSEGIVFYYCEDVKFIDNRVDLKYNNFSGGFDTIYALSVRGNPYNFENTIVSSDIEIINNTINANGHNYIYTIFLSANDFKLFNNVINSTADFYYANGINIDGPASEGIVSNNLISVESPYDVYGIYSYQMNGPIEYISYVNNTIIGKSYVGCGMEIVECNPYIADNLIIMNGNYTFGVVASIRDNGTISNNSISSLGNNNGTDGTGDPLLPLNSLGISVKGSVLIEKNKINSGGIGLNLVEKGNITINDNNINVNTTGGVESYAIYSDKLSNLVISNNNILFTGNTNGTMVNNAIRVNGDENKKIIAKNIIVDNNNININIPSIDVSYNPVTYEATVYSEGIVFYYCEDVKFIDNRVDLKYNNFSGSFDTIYVVSVRSNPYNYVFDEEDNIIYSIVSSDILISNNTVNALGNNYTYGIYISAENFTVGDNFVNISSDGKYANGVNVDALSSNGVIKNNNVIVNADIIVYGVYSANFMGPIENITYDNNTIRVNAYAACAMELMEPNPYVFDNTIIAAGNYTFGVVASIRDNGTISNNSISSLGNNNGTNGTGDSILPLNSLAISTKGDVIIKDNEIVTSGIGVKTLKGNVDILGNDIRTTGNHTIEAINSNLTVKNNYLVSKKAVGTDSIVSDKEVISANNTPALKTIISAPNIFTEYIKGAVFPVAALDENGDPISDIVLFLTMDGIVYNVTTDANGYAAFLLNPDSGIHNVVVSFNGNEVYGPKSVNSIISVDASASKIVAKTSTTVYLTSVKSGSYFNIAVKDVNGKGLANKKVSIYFNGKTKSYTTNSLGVIKFKLSANKIGNYQLKMKFAGDKNYTASTAIAKIKVIKQATKLTVAKKTFKAKTKVKKYTITLKDNKGKAIKKAKVTIKVKGKVYKAVTNSKGKATFKITKLAKKGTYKAYVKFAGNKYYKVSSKSVKISVKR

SEQ ID NO: 75938 - protein, 1330 aa, Methanobrevibacter gottschalkii
DNMEDTLNNNGSILSNPSDESILLSNDDVLAEFTTHEINVEKYSIYFNNNGDLISSKVKSGDTLNFTGDWNEVSSKTFNFNKTLNIVYSGSKPMKNGVFTFYNGATGSSIIGLNIANTEDYNYGIFLNGASNCIVKDCFINNTGMSSYAICIANNANYNNVSNNFFCDYGMNYGGQGTRSTPPVLLSGAHHNYIANNHIECDDANGIYLSYYDGGPLHGGVSNYNLIYNNTVKYNVLPTSWGYGIQIMGGYNKIYSNRIIGAFRGISTSNGAFNEIFNNRIINITGADFNHPVVEVGGEYGIVGSANAIIINNSIENARILPGSGAIYAIDNAIIENNTIDVVSSGYGIQASGSNISIKNNSIITESGAGVFWKGEYFDLVVVGNNITSGNGVGVLVKKESVKKMPGNITIVDNYISTGNKYAIDAIEVNADTSYVIENNTIPKGKGIVATPEGSYDPSKPRYIFKGTTYSITPENYDDYFDVGGTLNSVVKNGDILYFDGNFENKGVIYINSAVKITGKNPNFYNATFRISEGVWIENLTIKNKDSERINAWGILVYNTGGAIISNCNIEVTDPNAAYAIYVVESSDIDVLNNNLTSNGNYLTYTLLAISVYDCNFINNSIHTIGTGIEHVFENSHCVDGNSNCIDGSTCVGGDTVCTSGNTITGNHVLNEVYRTYGILMAYSSGCNISGNKVNATSKLNKTSNTFNSSWGNNYHNNISTNSIVGIDLYFNSHNNTFSNNNIYVKSNDNYIYGMGVLGSNTGHDAPEGKDASNNQFINNNIVLEGDYFVQGLVIGHESKNTTLISNTVNAKSNNFSYGINLEGSQKSIIKDNNLKLTSDIVYGLEVFRSNGNFIKGNNLDIKAKQAYAIALSNAENNIILNNIVMNNVTGEEITYNVCDSLGVGVAGICLKFNSSSNNISGNNITSKKGYAIVIDKLAIKNNLFYNYLNSEMGIGDKAINNTNNNFVKGNYIYILNGLIPEVTINYLGTADIVLNVGVDGVLVKFYICGEEIGNATSSNGVAKLRYKFDDSYTPAGYSIKAIASKKDYLTKEFISYLTIEKGLLNINYNDVTAIPTSKGKFVVVVEDIFGNSVSGITVKFYRLQGRDVFIGKVKTDKNGVATLVAEVPSLGNYKLRADVVENDNFKSNSGKANLIVAYKPSIYQYKTKAVYYGNTIKYTVRVKGIDGKYVAGGKIVTIKVNGKTYRVKTDKYGKAYKSIKLKAGSYKVTAQYGVTKVSSKIKFKPILIAKNIVKKKSKKIKFSVKLVNKHGKILKYKKIIFKIKNKKYSAKTNSHGVAILSIKNLKIGKNTITSFYGGCTISNTITIRR

SEQ ID NO: 75939 - protein, 1536 aa, Methanobrevibacter gottschalkii
NNTTVTDVLSTVEDDVGIQQIQSFQVDEPLLAATNNNIQINVKHHYNETANTWDEDGYNLANATVKLYGANDKLISTHKTDSKGSVLIKNLKSTKYYVEVSYADYEPKKSKVLDFTKKSGTLKGSFDFIPDILLFVDYKSHNEKLNVLMNMSKRVAFISTGQDYDVSREWLVGYARFIHIDMFSEGAYAIFTAEKLKKLLAISPANANYNVAYTFGVYSNSILNATGLHIVGANSKNNTFNTIENTYIGSYFQAKDINLSDVLYHNMENYLKYVYYLINPSKYENPTLNDSNAPQMGPECGFYHPDLGIFTIYPEGSLINNWIKTNPGYGVDGIGSLNWMIQDYPKWFVDLLDPTTLFEQFENQFIDRFNPNKKFIAIVSYYCGGEVVDSLIRGYEEIGRPAFNVFKFSTDPSMSSILNKINNVSKIGISSITSLYSWSLSYANGSAEKDLSDIDVEILKGVNEISKYSYESELGPQVEWTYSVTYPSFEGVFSPVILSYLDEDKVHVIQSGVDKMVQLSSRWADLKDLNNSEKTIAIVLYNYPPGKAEIGASYLDVMQSTYDLLIKLYENGYAIGDIRKMMNITEFTNLLIDSGNKGSWAGGLLKKYVEKNWDELVKHNQLISMDEFIDLTSDLPDELYEEMVTQWGAGLGKSMVYTASDGKQYLVIPGVWFGNIFITYQPSRGWEEADIGEVIQNYHDLKLPPHQQYVAFYEWMDKVTKANAIVSMGTHGTLEWLPGKNIGVGSGDWSYELTRIPTIYPYIVSNPGEAMVARDRGLAMLITHMTPAIVSSELYGNYSILNNYINSYNNQIKLNVTSNANIYKEKILKLAPNLGFRKMSKGESFNHWLEELHLYLESMGDDLMTYGLHNLGKVLTGNELSEEVVTIVTSQTKIYNQIMEFLYPNLKGKDFYKDIQGDVKYLNERHTIQAFLRNYVDGLVNGSSVLDLVNKLGVNKDSSLFSSMKYAQDVIINIQNNNEWNAILTALSGGYVKAGLFADPAYGDSIPTGYDGYASDPTRMPSEAAYESAVNIVNLLLADYYEKHGKWPEMTALILWGTEISRTEGIGVAEFLYFLGCKPKWAENGKVIGVELLPLKDLKVKLHNGSVVNRPRIDVYASLVTSNKDWITWMVTATRLAANAGESENDNYVIKHYNEYPTLDRLFGLPGNILEGTGMSTLIPNTANWNISTVNVEGMNVYLDTVSFSWTIDEKGNINITKQKDTYKYLLTKTELITQNLDSTWRILDSDDYYDWFGGLYNAASILRQKAGLSRPDTSFVDIRDKNKYVTRTYEEEMEFEIRTTLLNPKYLKPLKGTAAGMNWIASRMQNTFGILTISGNKLNKELGNQMSNTLLDLASGVRDASTSYGIQSAIAHMIYLATQGTWDADSETLQKLADEYMRQVLKYGVACCHHTCKNLDFNNKVIQVSSLTPAQKAEFAKILAQATNTDPLYEVEKDSANNDNNAQGIVNGTTKDKQSDSESGDKTSFGGDSSQAGDAKSASQSQDSSDSSGDSGADAYELSQQSASKSTSGAESSMP

SEQ ID NO: 75940 - protein, 255 aa, Methanobrevibacter gottschalkii
ANDYQIVITYGETTKNNAEYKNTVDSFFENQAHMDLKGVNSKIITANEVNKISSTITGKSYNSNQIFSSALVDLGDNDNLKVSVDKSKITTITGDMYLSALKSAGITNGHVYITSPVTATGESALAGIMNSYEVATDVEIPAPVKEAANKEIYTQAEIVKESNVSADDLSNLVDDVKETVKEENITDYQTIVNIINNTTINYNINLTYNDIENLAESIEQIQNVQGDINSYQTEVNDVLNTTDTSNTGFLDGLFN

SEQ ID NO: 75941 - protein, 8 aa, Methanobrevibacter gottschalkii
MEAIPTIP

SEQ ID NO: 75942 - protein, 153 aa, Methanobrevibacter gottschalkii
YGITNSDNPIFSDLSSMSANDNDAGNGIGNNTVTGNGSGNTIATTSGSGSGSSSSSSSGSGSGSGSGSGSSSSSSSGSGSGSGSGGGSNSNSRTHLSYSEAKSIANDAIEEAGCYAGSGSYSGGYWYFTVYDANGNNVDTISVNDNTGATGRG

SEQ ID NO: 75943 - protein, 22 aa, Methanobrevibacter gottschalkii
LNVFPNLNSIVMSSEYINNSLF

SEQ ID NO: 75944 - protein, 16 aa, Methanobrevibacter gottschalkii
LMGPIASLNQVTGLHI

SEQ ID NO: 75945 - protein, 118 aa, Methanobrevibacter gottschalkii
NTAISIPSPDYSYDSCEFRTAQDVMEILSGKVNFTDRTFIGEISKILKDNKNSKESINLVSKICKNKFKSLNLTNYRFTENKILKEKILDSSGDYSKSNMVSVATRNYDDYSYTLSVW

SEQ ID NO: 75946 - protein, 11 aa, Methanobrevibacter gottschalkii
KIIPVYNINKL

SEQ ID NO: 75947 - protein, 18 aa, Methanobrevibacter gottschalkii
ACGDLPDKNTASSFMFYI

SEQ ID NO: 75948 - protein, 912 aa, Methanobrevibacter gottschalkii
DNKNETLLTQKETDSSQKLCKSSVSKETSKKEKVTLKAPNLKMYYKDGSKFKATVKNKNKKAITKAKVDFTVNGKVYNKKTDSKGDAYLTISSLKSGNYPIKIRFAGTTKYTAISKKSTITVKSTIKSNDFKKYYKNTSPYTSKFYNQKGNILKNKAVKFKLNKKHYTVKTDKKGVGKLPINLKPGTYAISIINPKTSETVNKKITIKSLIKTKDLSINGQNDGKFNVKVFNNKGEVYPNQKVTFKINGKTYSKKTNKNGIATLDINLDVGKHSITTEYMGLKNTNKININKIVKSTNYIHTTLIPNYVNVTAKYVVNNSVYCLKSGINGIIKMPKNEIFKIQVGGKIYTFTTTSINGINSITLRYNNNYLVPFDGSGVKSYTNRNKLTSDGIIISKVNDYTQIDYQSKTKDNTALFGFYASKGLDKSETLTYVENDKITAKINFNTLSFDEFSLRYSLSALHGKTIYNFNYGNYNDTIRFANTNTPVTFSYFGNSIVGYASQETIITKFKVDEIKEVEKEENISYGLNKKYRTAMGFEVLQSYTLINEKINQKTLENWVLKNPDYLSRFGVMNIYGMHLASLEVAWIADIIADKSSKELNVNWKRNNTLTILGGINLEDTYLNILNADMGMKVTGKFDNAFLFKLLNSMNLPNIEEYALLKVAYRYLDKSSNSLDNVFLSILKNNFSIAQLDDMIYIFSEANSKSAIILNTSSGVSSVVLAQNSVYKGSSLKTTHDCCGVGIIPKDIIKGIKETFNIINNGLSNIYPNKTHPISKLFYMAANLLAKPLNGVGSLGMNLITTMALIQSGGTTYRNEMVEKSDWHEVMDKITFTRPGYLQSKKIYNIPNEKGGCDFIEVKIRDDMTLDRNNAIYISDGKTRKLSKTETYKYFIDDYWTPFSMPQKYWDKSWNR

SEQ ID NO: 75949 - protein, 14 aa, Methanobrevibacter gottschalkii
PYLAYGYLGKPEAL

SEQ ID NO: 75950 - protein, 12 aa, Methanobrevibacter gottschalkii
GKFLTFDDIGFF

SEQ ID NO: 75951 - protein, 18 aa, Methanobrevibacter gottschalkii
EPTLRVLYFKNPAYVAGA

SEQ ID NO: 75952 - protein, 70 aa, Methanobrevibacter gottschalkii
WNMQNIVFNENMDEQQKEKVKNAIKEVSQIDQGNELNDTPDISKSSGKGFTEMGKVYRDSDTGKLIMVEG

SEQ ID NO: 75953 - protein, 21 aa, Methanobrevibacter gottschalkii
MVAIPGSEFLTAALNVVSQSL

SEQ ID NO: 75954 - protein, 17 aa, Methanobrevibacter gottschalkii
PGLAALGNGDVSTLAAA

SEQ ID NO: 75955 - protein, 11 aa, Methanobrevibacter gottschalkii
KIQLNSIIGSY

SEQ ID NO: 75956 - protein, 19 aa, Methanobrevibacter gottschalkii
NIISLNMGDMKPINIVSID

SEQ ID NO: 75957 - protein, 124 aa, Methanobrevibacter gottschalkii
AHPGHGSEYVEEVTSDDVGSSSNSGSSSGSSGSSSNSGGSTVPASSSSSSSSSSRSSSYSSSDPYSSSSSSSGAHDSNHDSYQGSSSNSVVKDNSSLKDANKTNENLTNDSGEIDNDELFTVNN

SEQ ID NO: 75958 - protein, 943 aa, Methanobrevibacter gottschalkii
EDIGNSDVFENPISTDIQQDDLSEDDLDISNLNVKVNYQYADDNGKINPTIKVNDKHIISKEFNSSYQNYNVIINSTNIADKLNISISAPGYLTQYKIVTPNMGKSILANVTFNMESSESYKLGRDVTAEADKLLDFKNADDVLAITTAGVAKYNGKTSEDAMEAMVNYGKISYSNILMLRQSAIDPIDFAFIVKKGNELKAIIFQNASTKYSYLGTISENMTKAQWNKYYKSLVGENSWAFASLANGWAAGVSREILQEAAFHGHICEGTLGGYSIIQALLKYYPPEQENNPGGIGSPADITAYKVLGVPGGSDDDAALFFLDDTIGKTGYAGMNTTNTGATENMIGFIKWNSKQKTGDLIIMSFNSTKLKKLFKKETKINADAGSLEELKYCSWWINKINNNPEKLVDFLYEFTGLNQEQYNYLMGTTENITYDGEPAEYGLDGHGLDLNYILSLNLPTAKRTINSVAHAKLTDAELKQIGIDAANKAKKIFNEELGVEIDRDDIDFLALTDAGYAFLNGQDTVVVRDGLHEVLGGTLYSQNLLSLHQAVWKPLWFAFAIRYPDSDLVDMIYLRYNPDTKDFFVGTLDGNRVVDIGFETLNNSDKLKAIAKSFVPDGNWFNIQSIVNAWNEHPLFDQMATFLYHAHVCPGVQPGFFITDYIQEKYPLGENESYTYIASSIYCKDDSLTYLLDLSPGLGTFYVQKLPKNETENGISQGVLVVWDKNLKIGKAVIVNFDDWGTIDTSMYVTSEAKRASQIKAYIDIYGNRNNPNVKSKPIVSTVNEKWITEEQFNMLKQGAGDDFNVLSYLKSLDDITKEDLLKSINQNSNSNSNSNSKPNINPNSNSNSNSNSSSNAIASHTNSNPSSSGSVGTSGAVVSSAYVGEFTKDAESEDSQNGPDDAKSYEVSKSPAAKSADSNSLIYALIGVLAIGILLGVGYMK

SEQ ID NO: 75959 - protein, 11 aa, Methanobrevibacter gottschalkii
SIPSPLGVPIH

SEQ ID NO: 75960 - protein, 117 aa, Methanobrevibacter gottschalkii
SHGVDVTADTMVVANDSNGKMVKSIAESNNINISVYKFTSEDEVTHILEHSINNTNKRILFTAYQETANDFLKKHPDMSNRIIVIDNVNDNTTLEGLQNIMNVPVENVNSENNFGLP

SEQ ID NO: 75961 - protein, 11 aa, Methanobrevibacter gottschalkii
SFDYRFEDPLN

SEQ ID NO: 75962 - protein, 18 aa, Methanobrevibacter gottschalkii
IGGIPLFNSVLKSNSTTN

SEQ ID NO: 75963 - protein, 80 aa, Methanobrevibacter gottschalkii
SQSIANQHWTLNPGQLVLYRAAFTLEVFEKIIPLAGSTNGHILSMIFSSGSPRTFIGEYVLHYNVCLTSTLFGPVTLDFG

SEQ ID NO: 75964 - protein, 19 aa, Methanobrevibacter gottschalkii
ALPELQITYYSTFLSFFSS

SEQ ID NO: 75965 - protein, 11 aa, Methanobrevibacter gottschalkii
VAGLGADPLAA

SEQ ID NO: 75966 - protein, 15 aa, Methanobrevibacter gottschalkii
LIVMGASAVLKYAMD

SEQ ID NO: 75967 - protein, 11 aa, Methanobrevibacter gottschalkii
TIVSGPVAVAV

SEQ ID NO: 75968 - protein, 21 aa, Methanobrevibacter gottschalkii
QIAFIFSYSESSAQLEPLIAS

SEQ ID NO: 75969 - protein, 119 aa, Methanobrevibacter gottschalkii
QHLNVVVSGSMEPAFYRGDIVLVEKADFFGIHEFNASDVKVGDVVVYDAAWYNQPVIHRIINITDINGTTMYVIKGDNNNAPDPYYVTSSQIKEKVVTVDDNLVVIPKIGYLSLWLRGL

SEQ ID NO: 75970 - protein, 366 aa, Methanobrevibacter gottschalkii
ANWNSFAGGVDHNAFREESSDFVTNLWTFNMESPIHSSPAVYKDFIYVVSTQGILKVINMETGEKDWDFDLESNTNSSPIINSNKLFIGTEDGIKAININNHNEIWDYDCDDVESTPFLYKDTIYFGSDDGHLYGLDKDNGKVVFNKKLDGELKSSPIVVDDTIYIGSTNCKLYSIGTDKDKNWEFTTGDEILSSPSFINDTIVFGSNDGNIYCLNESDGALNWKVDLNNKVLSSPTVDNHDNNIFIGSDEGNLTCIDNRDGTIKWSHSVGGKIQSTPAIKDNLVVFGSDNGNLYVLNKYTGSEEFTYNPGTILFNSAINSSPVINGNSLIFGDDSGNVYSLNIDKHEVPGSTQMYFSISVLIIIV

SEQ ID NO: 75971 - protein, 150 aa, Methanobrevibacter gottschalkii
GMGGEMTDLPILVVSQSHGNLTDLTLDTIKTTETYKVIEVIDDLDEGKKRVDSGEVKAAIILPSDYDDNSTQQKSVTLYLDSSDQMASQILDSSTQAIFSRLSNMVASQTNVENKDANINPSISNSFNNFKDDISLHINRIYGNIKYIDF

SEQ ID NO: 75972 - protein, 38 aa, Methanobrevibacter gottschalkii
YPIETMPWILQKLAYIFPLTYLNDAMRGIMLKGQTLGD

SEQ ID NO: 75973 - protein, 20 aa, Methanobrevibacter gottschalkii
MVYNELINNINLININNIIS

SEQ ID NO: 75974 - protein, 142 aa, Methanobrevibacter gottschalkii
SSYTIVTAEAPNIQGLIDMQIQKISSILNPETVNEALIKDPTPINITNKKDVALKMQDLSKVDGVNVDSMNISTRDNPSNDKNFTVIIEALGYASPNSTSGQIIISQEPSYKIIASAPASYRGEGIMADTNSMTITSVLKLY

SEQ ID NO: 75975 - protein, 12 aa, Methanobrevibacter gottschalkii
MTFFLESFPGLL

SEQ ID NO: 75976 - protein, 13 aa, Methanobrevibacter gottschalkii
SSVETLLSNPSLL

SEQ ID NO: 75977 - protein, 13 aa, Methanobrevibacter gottschalkii
SISFGTIGVGFDK

SEQ ID NO: 75978 - protein, 261 aa, Methanobrevibacter gottschalkii
SYENITDKLIKTQEKENMEILTSEIVDNLINNPGVPEKWFEYGKGTPGLAIINEGGEIIPNSVSYSKLISLKENYKKLVDDQLFKSKFHSSMELIPQKRTISSVKIGSNSESNNIFSVNRLVKCDFYKKYVLKDFKNDGKCNHNHDQKYHSCNYFKIFKGNLKNSDYYLLIEDSEKYDLKYIVDTTRVVKEKYWENAISNKIYLNDKINFYDDTSAIVFIHFNKPQSKVVLVSVPKNFDKNKLNYDYFITNECQFVLKVWY

SEQ ID NO: 75979 - protein, 283 aa, Methanobrevibacter gottschalkii
TSINYIQNKNIGIESNDNFKYIIDDYTQNLELNCRDAIDEATQKVFNGLPVTNSENQIKKNLNKILDKKNKEYEEKYDVKINSETLSVENTKSPWKILFKIKLNIKKGDEKYSKIVEKNASVEGLRDPLPIAKLTIMSGILTYDNQIHYKTALSTYMLLHHLDSPESYIEATAPLYIKKCPYDPYIHHGDPGVIEDCLKHGYFHESADGSCYLCRLEGKGKCPHYGLEVFIQTHTPLKNESLSCPDHVVFADHYNGEKINPDDWNSLILDSSHRKKYGLINDG

SEQ ID NO: 75980 - protein, 25 aa, Methanobrevibacter gottschalkii
AYNEEETVAKVVNVVKKVSFVDEII

SEQ ID NO: 75981 - protein, 31 aa, Methanobrevibacter gottschalkii
NDGSSDNTEMEALKAGAIVINHEVNKGKGEA

SEQ ID NO: 75982 - protein, 33 aa, Methanobrevibacter gottschalkii
YNLTSSKVESMIKPILDGGADITKTKFSRASGR

SEQ ID NO: 75983 - protein, 47 aa, Methanobrevibacter gottschalkii
GISIMEVDIGAIEHDMSPLSDLNLMANEVVRTIIGRANKYGRVTMID

SEQ ID NO: 75984 - protein, 227 aa, Methanobrevibacter gottschalkii
LGAAHFDHGVLSIEPNSRNLIIYADDSPRDTISVRGPYTIDTAIENESGQIRMPSDAMMTLGVNINDTIKLGANTYKVNETRLGEPDILRLPIEVKKLLQVENGEVIQNSRLKDVFDGSLITHAYEYNNTTIKEKYFITSNEKQSSTYEIFLDNESIVNSYGTFKDNGTYDISVDGNYLTSFSYKNNLTKSFKFDGHDLEIVFRDTNSTSIKQFSSGNQGVFLNFNF

SEQ ID NO: 75985 - protein, 126 aa, Methanobrevibacter gottschalkii
GFFDFLHWDDDSDNINVVEDGQYCTVNQVSAYIKEFHKLPSNYITKKEAQSLGWHGGPLKKYAPGKSIGGDTFTNRQHILPDSDYKYIECDINANGTFRGAERIVYNTGNYKVYYTDDHYNTFTEV

SEQ ID NO: 75986 - protein, 20 aa, Methanobrevibacter gottschalkii
MIIVYGKYSIYLLGGMEMLE

SEQ ID NO: 75987 - protein, 15 aa, Methanobrevibacter gottschalkii
KTTLFGPIGGHLGFF

SEQ ID NO: 75988 - protein, 11 aa, Methanobrevibacter gottschalkii
YNADLSSLPKL

SEQ ID NO: 75989 - protein, 17 aa, Methanobrevibacter gottschalkii
GLVDLQYNVSIIEAAMP

SEQ ID NO: 75990 - protein, 28 aa, Methanobrevibacter gottschalkii
SIPSIFETPSVSILIPGVDIPGSQIYVP

SEQ ID NO: 75991 - protein, 108 aa, Methanobrevibacter gottschalkii
IGIPHYFAEDGISIDRIVSDSPSEGILKEGMILQAIDNHKINDSESYVNIVKSFKPGDNVTVQTNQGSYSVVLSKNPNNDSVGFFGIQAAKHYVLLNDSLGPIPWILF

SEQ ID NO: 75992 - protein, 15 aa, Methanobrevibacter gottschalkii
SRSDRVIDNVVSGET

SEQ ID NO: 75993 - protein, 13 aa, Methanobrevibacter gottschalkii
VPTLASEFGMSNI

SEQ ID NO: 75994 - protein, 11 aa, Methanobrevibacter gottschalkii
YHLQYIRGYDS

SEQ ID NO: 75995 - protein, 18 aa, Methanobrevibacter gottschalkii
VMGNVPMIEKYFPLLITS

SEQ ID NO: 75996 - protein, 30 aa, Methanobrevibacter gottschalkii
GGLCPTDASVPAYAITAKAIAVAEGKVTMP

SEQ ID NO: 75997 - protein, 11 aa, Methanobrevibacter gottschalkii
FLGAKGVTWTT

SEQ ID NO: 75998 - protein, 18 aa, Methanobrevibacter gottschalkii
CNALAFPVSTGPGSRMAH

SEQ ID NO: 75999 - protein, 95 aa, Methanobrevibacter gottschalkii
PAADLPLITDEAKGEYVDSSGLPYFSEMDSYYNLRLTEDYIDHGYVGDQIINGSEWDMHRYAPTGNQINYELGIVYVTSFLHDIFGGDHSVREIA

SEQ ID NO: 76000 - protein, 58 aa, Methanobrevibacter gottschalkii
GLDGVTGLFGSLLSLLSLQSASRVVGGFPNVLVSVAEMQIPSMLGSGMNSLFLANTNG

SEQ ID NO: 76001 - protein, 336 aa, Methanobrevibacter gottschalkii
LTSESVVPGTSDSMWNAMTWVNETQSDDTVLTSWWDFGYLFEIAADKQVTFDGGSQSGDRAFWLGQAMTTDNLELSAGIFRMLDTTGDKAVESLVNITEDTGKSVDILIDILPMKSDDAQKTLQSKYHLTAAQANEVVQYSHPKNPRPVIFVASSDMLQKAGWWSYFGAWNFTNQSSENYNYYVPTEQVKVNPGSTGKLALLDDQGMTVNAVIQRGSGNNSTTAYTEAVYTDSGKQIMVNDTPYNPLNISNLMVIEDGYVMKNQSVGNVKDANYTLLLIGEKNQYTPILMSNELANSMFTRLYLYGGAGQNIFENVHTENGVMLFKVNFNNTAAGA

SEQ ID NO: 76002 - protein, 2051 aa, Methanobrevibacter gottschalkii
NTTNSSDIYISNEGSDFCGDGSIDNPYQTLNYTIGKVSNNSNIYLKSGTYNSTGYDIVNKSISINGIGDVTIDGLNGFISQSIFKINSNASLFLNNIKFKNGYCDLDNETPSCIINQGRLFITNSTFDNFKTSVGVITNENYLCISNVKTSNLSNSQLFSAPYKYNIPIQFIYNIWCCDIYNSSIGASYNNKNMTLTNSFIERFVSNKDYSNQTSYAYFNNSNVHLITANDCDMLIFNNTYINCYFDVDDTTHTIEYSNLIWDNVTLSKYNDLFYFSLKIGYSNLTAISSYFLTSILFLSSNATISYSCILSNIITAVVSNVNVNYNWWGDNKGPNVMNGEFSKITSNYWVVMMADYDDSLVKIDLSKYTNGLDVWNLNNPSKLRTRLVKLRTETGNLTKTSGYLENATFYSELNGNNINTMLYAMVDNQVLRIVVGEGNSDYDLYISDTEGNDYFCDGSLENPYKTLKKVVSKAISGNKIYILPGYYTLSWNANIKILKNLTFIGIGNATLSRSNARNIFIVQEKGVLNIENLTFTQATSGYHNYYDPIIHVIDGDVNLKNSNFYNITTYGVVFSDKSEHVTVNNLTLLNVEGPVVVGNSTKVSIYNSKFFNGSEASFYDSYYSFLIPVCSNLSVVNCTVDGYKGGLIKLNPRYEQIAARSYIYNSTFLRNYQYNYVYAPMVSTYSYNYMTGFSIIENCTFCNNIGNLVFSNIINNCTFVSNKRIRYEETNIHYNVNYPKALIYAKIIINSNFNNNSFISKNYEDMVIHGDEVYYSTFINNSAAFGGALSGSKEIHYSIFINNSAAFGGNDVFVYNGDLNCSSNWWGSNQKPDSSRVFVFIGTLVLDDWVILTMDYKNDRVIAYLDNLLDNNGNSYPLNHVLPSRAVIFSTEGGELTPSNTFLVNNKASTFLIRLTSSDFNVFAQVDNQITSLTVYNNTTQILMSNVVIYGKDVLYNLSLININGHKISNQDLNVIITHKNSIIDSFIVTTDKSGDASFSVDYAIGIYQVNVVYLGNGYFEECNSSATINVSSIKTKLQSYNQTYSGKNNKFYAILVDYHGRYLLNRDLILRIFDLNDNLVNTVDVKTGVGGRADVLLSLDVGNYKMKWDYLGNEWYEKSTCISFVTIRPIETNIILPNTTLYGKGNDYEFTFKDMYGNLISNEMITFKISKENESSKFSLITKKGIASININLLPGKYDLEAVYAGDKVYGSSFASAILYVEPIFVTMNHNSYQSLPKNGVFTVILKDMYGTKVSGENLSLELINKDIHKVYEAVSDASGQANFKLDAPEGVYFALINYGGNIWYGSSVSAVTIEINSNVPINPVYINGSNLVQYYGEDKYYLIKFNDTNAYSLEGKLVNVLINSEDWSNSYTLESNVFGEARIQIALEPGTYNITYNYKNEYYGLFAQNSSTIFVYKMPTSLIASNMILKKGDSKNLEVKLVNKNGDPIANLPVIIKIDDNEYNITTNQKGIAKLLLNLDLGTHNVTYSFNNKNYISSKGNVTILVVNDSKKTTTLVGNDVYTREDQTINYTVLLSDLLDNPISSSEIVLKIINSDDINIKTYKGYTDVNGVATFKFNLKFGNYFVNAYYNGNSVNLPSFTTNNLYIKVLENYTETILFGNDIEIHNGGDDYYSVVLSTVDGEFIKNQIIEFIIKNNSYFTNTDENGIAYLKIPFSPGSYEVLTKFHGCDNLTSSSIHNYISIYGDLFNFYSKDVVKAYNNGTHYYVALYDTNNEPLSNKTINFYVNNQTYQDVTNADGFVCFEVWLNPGKYIINATFKGEYPDEFTSVVNNITVLPTIMGENLDVYYNENTVFSLFLLDYNCKPLENTEVVITIGGAKYSTISTFGSASWKLKLNAGVYNVICKNPITTEKITRKINIKSTIISKNLVKYYKGSSKFSVTFKDRFGNFSRNSKVKFIINKKTYVKTTNSRGIVSLNINLKPGKYTIKTYNLKTGEIKTNKITIKTLIISKNKKVKAGKKINYNVKVFNSKGKIAKKATIKFKIKGITYKIKTNKKGIAKLNIVLKKGKYTLKTSYFGLSVKNKITVK

SEQ ID NO: 76003 - protein, 1858 aa, Methanobrevibacter gottschalkii
ENSTLNTSIKINNDLNQINLGNEINLIDEAPKEVLQDESEISITPQNYNKYFNVYTGKFKSDIVSSKITTVKIGNVSKCLFAFEKPVNLMPIDSSCQITNGVIHLLPGSDGSTISGLKIINNDSVGDIKYGGILISRAHGIWLTNSSNNLIYNNTIIIGNQKGCYAMPMGYSNNNRILNNTIISGLTSCIVMGRSCYNNISNNYIEICGYELFTTSNLIFFNPWGHADYDDGVAECNGNYIANNYLKNYGTGIWAITLSLGYYSGDTQVINNTIIKGSSGISTSDMLFTQPKNILIKDNTFIDCPISILTCSNNVTIEKNKIFGSSEDNAIYIQANDAQLYNHSVTISDNYIEFENLGCAILVHSDNVTVVNNEIHLSRYGTGIGISPTDFPKASSNNCKIENNKLYLSGDMGIRILGHNTTICNNYISTKDKGIVISSSGYKIYNNTIIANIILSDDVPIYIEGHVVNSTVMYNEIETNNSEGIHFNPSGDLSDYFGKVSENTINGIIENTETIIVNDTNFYDYFDLSGYLNYEFKPNSKKIIFFTFLTNKNIYFTDKIFLSSNKMYNLLHNVSIKFFENASGSLIQDLNFYNIGNNSIILDGVNDVSINNNDFTILSNKGKNISTISVIGGENCIISNNNIFMNSKSNFTTAISISNPNGAIIKKLSKNFKIFNNNILIKTNGIARGIYADSLVETNILENKINIISDSSAYGISIENTNEIVYNITIDNNLVVINSKEMSYLIKLQMIGTSDIINNYLVGSSNGICGIGAYNSLNLNINRNEISISGKKPINFPVFDELGRNNVAIYLKSTVINGFSRNIFDIENSTILIKDSSSIIKNFNVNSYVIADYNHDFYFDSQNKLKSNIINDNSIILFKNFTFKKITNINIPVIIKPYKNLNNFTATLILSENANKSSIYGFNFINANINLNGVDNVNIFNNSFKCSEITDNNGLNNIIFNNSFEFKLNNADGIIFNGCAGGIFTNNYILIDSKKSNFILIRKANGTKVNNNYINATGDSLVLIKSDSSENTQILKNIINVTSTGDFNVYNAFKTHFDNISNNEIKCRGTSNSAVIYYDSSSSCNKIEFNEIISSSSNGREYAVVFDTKHALSNTIANNYLITSNGYRRGNDAVYAIFELVCNNTPVTIYVSINSTEDGNGSFTNPYLTIHQALENSLSGAIIYILPGYYKESNLIVNKNITLTAINNDGAVYIDALNNQLFTITEKGSLTINALKIFNGFSVEGGSLFFNFGSLIINNSVIYNSSSYYDNSNPTFKFTNIQTPTLSYSYDCENLGLGGAILNYGNLLINSSTLFDNFAHKGGLLADFGKSTIKNSLIFNNTAVHGGAIFTDSSHEFNIENSSFLENLAIQTLDYCYIQRKSLDSGGYEYRSLCDMRPGYGGAIFSNSSLIISNCLFERNIAKSGGAIGHYSKIELNSNRQGPNYYAVNQNVYSQFRYVPKLKIENSIFRYNEAKDTSCGNLSMISDRMYNYYYSINYNGGAIFGSLSQLTIFNSLFEHNVANTVGGALCVQCENSVIESCKFYNNTAGEYGGAIEAFGTYRIFNTEILNNNAKNGGAIKYTSYNSYGHLQEMMSLFNVTVTGNKALSSGGAFITQVANFAITNSNIYDNSAPYGNTFYGKYGYDSSSNIDARNNWWGSVDGPDDSVWNSANSKFKNWLNEKVNWHVPHVSGGSSNNDESGIGNQNNGVNSYIPSSVSTGSGVHTGSTLTNNVKSSGASSKGFSFTGNWPSGTANGFNNGGSGEGNAVNSKDNSGNSRTSIAGNVKNLNSVSKINSSNVNNLFSVGMDANAADSSASSASSSQGGADESFSNAYEIINEVKKENNQKFSIFNILLIIA

SEQ ID NO: 76004 - protein, 1728 aa, Methanobrevibacter gottschalkii
ASEITLNADNSIDEISNEDMGILNEVSPSNDIKHIYVNDTGDDSNIGSINSPYSSISKAIGDVNSSTNTTIYLSKGTFGKNNDTNFQFTNEINTYFDNCNVTFIGEGTDKTFIDGKSTYKFMTILEITPNLVFKDITFVNFRGRGSSVFELLEAGNLTIDNCVFKDSYSTSNGDTISSSNSGDLKIINSQFINSNGGIISLLYEDVSPGTLYLENNTFVNITNSENNGIAVTSNYAKAVIKNNKFNNITCINQNQVTLYLEAPDEGTLVLTDNNFVNCECLNEYFMAPVYLWAYEEYVIFERNIFLNSTGASGFNILLNGRMDNLNISIGADEINVHNNEINHGVNIPINITDDVGNLVLINSGIQLNLIGDNNNYTPYLSLKNKKLTFATVPESGIYNVTITYNDGLSTTEVLTIIKINISSSPVNIWVSPKGSDSNNGSEENPFKTIQHAIDTGFEKSFNVIIYLDEGIYYGESNVNLIITNKGSLQIIGKKYNKTIIDGEHSNWFLSVDTCDVEVKNLKFINGAGNKNLISGSNLLNLKDCIVDSNIASRNCYVLHQTLFDNLTYTNNTGTIYYNYNRNITKSNFINNKNIYDSTGIIYSSWAPIIILDCKFINNTALYDYGVIYSNNNIMSLNNYYYGNKAKNYGIFYASSYSSNKMILINDTYINNHVDGSYGIGISPYSSVVNCKFINNSAGTDAGIGSITITCSFKNCSFINNSATKGGVFVLNAVQHALGTTYEELISFDNVTFENNKASMGADIYLPPRSSNSYYSYTYPIELTITFDNITVTSLTDNLTASVYGVNGIIVGGAILEFYLNELYIGSSQIVNSNAILEYDGFSNGKAIVNGNIIHPSVKNNINNATLDIKLDNVLNHIDFWVSNIGSDENGDGSKTKPFKTIQYAVNKAFENCRDITIYLGEETYSGENNTNLTISSASNITIIGKGIGKTIINGGNSSYFVKILIGINKIIISDLTIINMTPDNRFDLPIGSTSPSGIHSIIKSGSTSPITVDKGATLYLNNVNITECRGGNAIIDGEGNIFIDNSILYKNGVSKGIIKCENLVINNSIIDKHLVGGYPIIGTNIIINNTKITDVFNIIRNGFYFISNAKNTTIENTCVLINNWENPLNILDIIEYYDTQICPAACIASTNAIIKNSSFKNEFELVYLWQSTTDYSYHNVYSGSNIEAVNSSFEGYQFIIYSRMLQNPIYKFDGCTFNNIANLMIMMQSRNSIVSFSNSVMFISGNKIASNNAFNNSFLFNNNYWGNNSKPVIPNSVSNFQIPSPDNWIILISEGEEPVFKLTDGKNVTEYICNLPAKISYVADENGEIIPVLNLNGNGYKFNVDENGNVVLNISAPMKNIVPKVPVDETVFANDIEVIVNSSSNFKAKFTNKWGDSLKGINVSFIIGENIINIITNENGTAILPVDFDLGVYFVKIVNPVTGQFIFKTIDVILENTVTANDIIVKYNDKSKFSVIFTDKFGNPLINTNVKFKVGKYIINRTTDENGIASFVINFNVGNYAVNTINPVTNQSIDKIITVNKIATKLTSPKLTVTYNAGKYLTLILKDFNGKALINQKVSIKINGKVYTKITNSKGRSSLKINLPVKTYITTLTYAGDRNHIKSSATTKVIVKKATPKMTAKKATFKLKTKTKKYSIILKDNRYKVMKKVKVYLKVKGKTYRAITNSKGKATFKITKLTKKGKYSARIKYSGNKYFNSITKYVKITIKR

SEQ ID NO: 76005 - protein, 336 aa, Methanobrevibacter gottschalkii
SLLSNANDSFSKAEPKGNVSIAITGDVMFARNMPGVLSADSSPFSGVSNVTSNVDLLLINFENAATSSENAVKGDVPLKCDPRYVPLAKGNNNTIASLANNHAFDYGIDGMKDTIENLKNAGITPIGAGENEKTAHNAVTQEINGRNITILNYMDSDNFAEYSYDVMPYANGSNPGYSVFDLADAQKQIKENNGSDLIVVYMHFGNEYSNSPNDNQVKIAHELIDSGADVVLGSHPHVTQGIEMYNGKPIFYSLGNFIFDQSNPATHSAYFVQIDLVNNTGECSVYPIVISGYLPHYMDSDSGNSLLNELNPNADELEVSNGVGKLRFNLTEGDSN

SEQ ID NO: 76006 - protein, 570 aa, Methanobrevibacter gottschalkii
SEMQQVNNDSVDSANQYVEPVKNASFSKVSNTNYLKDSNFTVSLKDENNEVIVNKTVYFTIDDGLVINTTTDGKGSAKLLLNISKGTHTVKYIFNETGFTPFKSSTKVLVITTSNSKIKASAYKSYIGFKKHYSYAKHISFKNTYKITLTADGIPLSNRIVKFTINGKSYSKKTDSKGVASLPIGLKAGRYPIKFSYAGEKNIKKVSGSSIVYVIKGMPKKIIKANSLTYKNKVSAPFKIKLVNGRGNILKNKKVTFTLDGRTYTKYTDNNGIATIYLKLSWGTHSLKVSSAKTSYYKSVLKKYSIHIKSKAVNNGLWMFSSDMKKANLASLKKVGTKHIFLYAKAIDVWGRSDVEKFIKTASGYGIKVHLWMKVFNDDNDKWINPVKKGKINYGLIKSKINLAKEYAKVKGVAGIHFDYLRYPGNAYKYSNGVNAINYFTKAATSAIHAINSRFIVSAAVMPEPSDMKYYYGQDISTMGKCLDVIIPMIYKGNYNAGSSWIQKTTLKFVKKSGHAKIWSGIQTYHSDRSPIKLTSSALLKDADAAAAGGADGVILFRYGLTNLINFNKL

SEQ ID NO: 76007 - protein, 489 aa, Methanobrevibacter gottschalkii
DSDHNKTDDSILGEADTSTSSNITRIGVNSIYDDGVNETIKTNSSFVSSNVVTYETFSTKITVRLLSNNNPLNGKNIIISVGNVSYNKTTDANGKVVLNVKLAKGKYNAMFSYGGDENINPCQKTTTVIVKTPIKTKIYCADKNINYRQDLKNTFIVRLIDGNGKALKSQTVTFKVNGKMYIAKTDKKGYAEVCLNLKKGSFTVGFSFYKKSPYSHSHGSYKIKVKAPIGKGNGYWLWPAHMKHLNLKSLSKLGTKHIFLHVQAISVYGKSSVISFAKKAHRYGIKVHLWMQVCCIRGDKWVRPVNKDGSFKYSFINKKVKEAISYAKIPGIDGVHLDYVRFGGTAHLYKTSTQSINYIVKKTSLGIHKVKPNCIVSAAVMPEISKMISWYGQDIPTMGKYLDVIVPMVYKGNFNQKTAWITKIVSKYKSQSKSAVIWGGLQTYHSDNNVKKLSYSALLKDAKSSKAGGATGSILFRIGLTHYLNFKKV

SEQ ID NO: 76008 - protein, 31 aa, Methanobrevibacter gottschalkii
SSFTFNWGTDTASYFVNTVGGSSDLTNANFL

SEQ ID NO: 76009 - protein, 24 aa, Methanobrevibacter gottschalkii
TLPGSVVGINALIHPNWNGLLNVN

SEQ ID NO: 76010 - protein, 36 aa, Methanobrevibacter gottschalkii
LGYMSFINGTPITDLITEGTGLVFIVFPMIFNIMGS

SEQ ID NO: 76011 - protein, 16 aa, Methanobrevibacter gottschalkii
LSITTTTSELTVNAES

SEQ ID NO: 76012 - protein, 120 aa, Methanobrevibacter gottschalkii
AETVTIGGFDFNVPDGFTEDKSHEIVNMEKEQGGIKYINNGKLFENDKGDVVNILVAKYDGHKVTNKIAKGIADEPKTIGGVDGYIVHNGTFTSFDYAKEGKLVVITTNNEDAIEGFIIE

SEQ ID NO: 76013 - protein, 186 aa, Methanobrevibacter gottschalkii
LTSSNSQDNSKITIMGNGSIHENGTIGIKLTNGENTALKNKTVHVCVKDSEGKIVVDKTAKTYVNGVVGVRLTNVSAGEYDVNVTFEGDENYTSSSVSQKLKIIAGESDDDPTYPVDEDTVTTTADASSTQSSQSSSQSQSYTPSRSNDYGGSSSSDDDGGLDADYDENGNEMLPTVDEEGNEVSN

SEQ ID NO: 76014 - protein, 131 aa, Methanobrevibacter gottschalkii
NLKDFKATKMLKKLTKQKTLTVKIYNFKPGVLWAPKAIKLKNGDAIAGYVEYKGNMQFEKGTGITSWYIGSGLDGDIEPHHTKLIKAKFFFKNKKGKVKTKTVKGNGGGHISTSLIKGYVPYKAKVSYKTY

SEQ ID NO: 76015 - protein, 23 aa, Methanobrevibacter gottschalkii
SNLGSTPVVAVPYAISLITSVDL

SEQ ID NO: 76016 - protein, 11 aa, Methanobrevibacter gottschalkii
SVVAAQNPYII

SEQ ID NO: 76017 - protein, 11 aa, Methanobrevibacter gottschalkii
FLGTFYNVPTP

SEQ ID NO: 76018 - protein, 106 aa, Methanobrevibacter gottschalkii
TPSIEVKKIDIKDITRSMIDEKVSVRGIITDIKESSSKTNYFLTISDGESRITLIIFEKQVSEITSRNLDIGDFKNKKVEVVGTITEYKSDLELILSSGDSLRIIN

SEQ ID NO: 76019 - protein, 49 aa, Methanobrevibacter gottschalkii
MKNSKGKVLTGKKITVNYSGKTYSRTTDSKGCVSWNVQKKPGTYSVKFT

SEQ ID NO: 76020 - protein, 87 aa, Methanobrevibacter gottschalkii
QTSSKTAKVTVKAMPTSLTVNNLAFTYGDGNNKLKATLKDKKRKVLVNKTVVFNFNGKNYNQKTNSKGVATLTIGAGPKKYTTTISF

SEQ ID NO: 76021 - protein, 75 aa, Methanobrevibacter gottschalkii
KKTVTVTVNSIPTSLTVNDLTCNYDDSNAYLYATLKDTKNNKFLSGQTITFKINDKSKNVVSDSNGKAGIKIEEK

SEQ ID NO: 76022 - protein, 175 aa, Methanobrevibacter gottschalkii
ASISKKINLNVQGALTPEINMHNGFYNVSNLLVDFTGDNAEYIVYCSFDNGASWYKDNHSLSFNLTTCNWSIIYYSSFRGFNSTINHVNYVLDGDVPLVWASHGSGIYNTNFQVNLTSVDLFDEKPIIYYTLDGSDPTVQSTIYSEPINVVKNTNLRFFAMDTFNHRSEIISVYY

SEQ ID NO: 76023 - protein, 897 aa, Methanobrevibacter gottschalkii
NGKTYNTIQNAINDDKTKKGDIIEVNKDIIIENVVINKNIYLISNNVIWQSNNKSPIIYMKNVNNTFIEGFTFKSDNGSGIELNNVSNCVIQNNNFYNKYGFSIHNENKDNDNLNNICIQGNNFYDNYYNYINFEVLENSKIINNNFESNKNVSAITILNSKSNILINNQFTNLNYGILINKSYDDVFFGNNFSINNIGLYLNCVDSKVISNTFINNHYGIYSINASNLRINFNRIVDNSKFGVYCKKGIVDANNNWWGKNYITNNALNSGDINNNENIGINCSAYLVLNVYETNYKIDNGIVYNVSYVANLRSNNYGEIFNQYFIPNCKIVYNMYCEYLYDNGVVYRGVNRIIDLMLSEGSSIKEYRLGFLNNLTVTLDHQNISFFRESSFNAYATIDIVSSAIFNGSNLDISVRVPLVDNVDWFSIVCRYVGNFKSELLLIYNGEVRNTIVIESSFYNEAKNVFSNNFWNALDTYHSCFSGYRNKQICAYAYLYLNDPSLNTIELLDNKLSKSNIQFKLQDVYNLLANNNITLNDILLNLIKNSYSLSDLEMSFIDYANGNLFDTMSVSLKYPGNDRLFFAFEDTINKTFVWRGDSSVSLYNIHYVNGGYFDLTAPFPIGDNGDLIYDNGNIYSINYNCIYTFLSSDYDCLKTYTFANSKINNNALNYWLNQKNRTDVNGELYYNIGYMKAAYGSFLEGLLVIYCNDVVADVSADKFNVSWTRVNPMVMSVCDSLEGYYLTGESDFNFGREVVGDVNNIKSFNFACSASFSIIEKYVIDALFPNEGNKSSAMFSLIDSLFNNGTLEFIVEGNYTLIRSLNVSNVVFVYDETTGILRDCINGCYGAYCYASQQTEWGHNFGENSLKLEDLIVGIINGIDTSLDNMNNDWLGFAGCL

SEQ ID NO: 76024 - protein, 15 aa, Methanobrevibacter gottschalkii
TGLFLVSNPVGWSIA

SEQ ID NO: 76025 - protein, 26 aa, Methanobrevibacter gottschalkii
TYYADDLNKGWNYNRGAHFIFDVGTS

SEQ ID NO: 76026 - protein, 19 aa, Methanobrevibacter gottschalkii
YYINKYIIGDIVINKIFSR

SEQ ID NO: 76027 - protein, 12 aa, Methanobrevibacter gottschalkii
FGSSIFLFILNK

SEQ ID NO: 76028 - protein, 14 aa, Methanobrevibacter gottschalkii
FNSSIILKYLKILT

SEQ ID NO: 76029 - protein, 13 aa, Methanobrevibacter gottschalkii
TDSFLMDPISAIT

SEQ ID NO: 76030 - protein, 993 aa, Methanobrevibacter gottschalkii
AEDINETITADSSIDDVNTVSVEDAVDETVSDDSDSDKGIVENQDVEKTTMLTDRGVNVNAATWSKLSQYAGVIGTDYIITLTGDSYATDSQIKFNNGATIIGSPNNYITTGSYTKTPFLNTNSALTITFINVTFKNMNVDYLLSLAGTNVLENCNFYNITAGTGHNAVIYNTDGTMNLTNCNVINSSAGYGVVSNYKSGTYTGVVMNVNHCTFINNSASVEPGAINNCGILNVDNSEFINNTATWWAGAIHTHYNAQTIINNSLFEGNVAGWNGGALYTYSTLKVYNSIFKRNKCHTNIGGGAIGASRWWSGNYDITIVNCTFEENENCNTNGNGGAITALNSGALNVHDSTFIANVAKNGQAISAFSQAFENITAGIPNLKVYNNTFYNHTLTTSDTVEISGNYTFENNTFINCYQTNLGTNNVFINPVTLNNNNLILKSNKEHLLMSNLSENILKNAPNVIYVDSNSDKDCDEDPNIDGHNWETAYGGIFALSSAIFNICDGGKIYLADGEYSYRTNGAITHPKNLTIIGQGANTIVDLISCGEETTYTCIFINLTVSGKDYGRNTNFINCTFIKPISISADINLNSVLKEHAVENGYANTYLINFDNCVFKDVVDDRIITLFEYGALNFTDCVFENITADSIVYRNSTGYFEDDSISFRNCTFSNCKFNGVVDSKTNFDDAIVIEDCTYDGDVALGTTEVDGHFYVNATKLKVVAVATNMSISSSQRGVVVITLRDAEGNAVSGVNVSYTVNGVNMSGVSDANGTITISDLTDEVTVSANFTGSESYLASNNTASFNFTIPKVSTKLYVSSVTTFYNAGKYLTATLKDSNGEVLANQKVTIKINGKTYNKITNAKGQATLKISTLLPKKYTATVNYAGDDTHIKSSANAKVIVKKATLKLTAKAKTFKKSLKTKKYTITLKNNVGKVMKKTKVTLKIKGKTYKAYTNSKGIATFKITKLTKKGKYNAYIKFAGSKYYNSLNKKVKITLK

SEQ ID NO: 76031 - protein, 205 aa, Methanobrevibacter gottschalkii
DGLINTFEDTIHAGGADFSISGKETGNSAYGTNTIDSSWTEKIAKVPGVDEAYPIYVVLTSVGDDYMNTLIGIDPEGSELADISMKEGRIFEDNTSEVILGEIYAEDNNYSVGDSIIINGEDFKVSGIYETGDQNMAGGVFTSISKIGELMDDKDSISNIYVKVNKGEDAQAVADRIDTKYGDNITTVTSVMEMTQMADMLNMLQ

SEQ ID NO: 76032 - protein, 11 aa, Methanobrevibacter gottschalkii
GPQMGINPLFT

SEQ ID NO: 76033 - protein, 213 aa, Methanobrevibacter gottschalkii
VWFIGHDVDLDEGSKTILVCAIDESEDRPGMGACDMAFLVHLENGAIKNYTPVYPGGMTHPTAQEPAEAQSQGAGSDLLLHDAFWDVDNSKGMNLAKEIVEYRTGSSVDSVVAINTKALDAILSAAAPLEVNGKIINGSGIDFIREDGSNGVSRGDAVMEIVKATANSAKDPVKKSAMINAAVDQYSKGNIIMDQQGSFVDLLASKGIETFFN

SEQ ID NO: 76034 - protein, 11 aa, Methanobrevibacter gottschalkii
SSTVMGDILSS

SEQ ID NO: 76035 - protein, 22 aa, Methanobrevibacter gottschalkii
IGNPRSGIAVYMSYLISEMNIN

SEQ ID NO: 76036 - protein, 140 aa, Methanobrevibacter gottschalkii
KEKVKVNVSIDDHPLNNKGFIVIKLVDSRGKDIESNGTIHYKITDEFGNYKWAYKSYDGEIRLKYTAGIYKVDVKFDGDFHYNSAIKNKSVIVKTEKFNPYTYYDNHNWGLNQEIDDYIEYNYWDEDIYDDPTNYDGEGP

SEQ ID NO: 76037 - protein, 26 aa, Methanobrevibacter gottschalkii
GMLSEWVATFLGDGLLSSFVCDGIIG

SEQ ID NO: 76038 - protein, 35 aa, Methanobrevibacter gottschalkii
FPYGGSDPQMSLLGMIGTAIAPIFAPLGFGTWQAA

SEQ ID NO: 76039 - protein, 26 aa, Methanobrevibacter gottschalkii
FGTLAGMEEDDEEGITNLIHDTFTPL

SEQ ID NO: 76040 - protein, 18 aa, Methanobrevibacter gottschalkii
QPGNIIWSYSWLHITDFG

SEQ ID NO: 76041 - protein, 14 aa, Methanobrevibacter gottschalkii
SGQLGYFGQNLSIN

SEQ ID NO: 76042 - protein, 47 aa, Methanobrevibacter gottschalkii
IASGDPDGLEKSAEDASVPEDFQIEPINGIPDAIFPDYAFASAPDNQ

SEQ ID NO: 76043 - protein, 12 aa, Methanobrevibacter gottschalkii
NMPIPFGTSGHM

SEQ ID NO: 76044 - protein, 17 aa, Methanobrevibacter gottschalkii
VGGIPLLKPSIRYLLKP

SEQ ID NO: 76045 - protein, 87 aa, Methanobrevibacter gottschalkii
RSLSEMTITSSTNPFYTLQSRADFTLHVLNLLDFVGGNAGLTHGHLLTSSIPGSDLGPRMLIGKIIAWRTEVTVTPTLIGQMVVDFG

SEQ ID NO: 76046 - protein, 233 aa, Methanobrevibacter gottschalkii
IHITTDNSSEVQKTVFDASTINKIPDTYFNYYRDGYIVGTTVDGFNASTGEKITLNGTIKWIGNNGGTDVKILVESDNTTYLVGLYKSIPEADIYIDKISLETNGSTYPNLVEIKASPENISTINDLNKNLSNSDFEISTIISLDSLDLVKIQEIANKINSHDKRMAIKTPSSGLGNSLILENANKQTLDDANSVLGNINGLTDELTIRIYNCSDSQLEQVKNSYNITNIRTF

SEQ ID NO: 76047 - protein, 22 aa, Methanobrevibacter gottschalkii
SEVGILPYTFVNVYLSIQEIAN

SEQ ID NO: 76048 - protein, 15 aa, Methanobrevibacter gottschalkii
DLGNRITEIYHAVFV

SEQ ID NO: 76049 - protein, 111 aa, Methanobrevibacter gottschalkii
VITNNGISFNNTSDSVVNNTTNTTNITANDTDETGATHDTGLVASSSDDGSSYSSSGYSSSSGSNSGSSSGHQSDNSQSSSGSESSSGSESNSEPESDSAGQSEGSSADFE

SEQ ID NO: 76050 - DNA, 123 bp, Methanobrevibacter gottschalkii
  source 1..123: mol_type = genomic DNA
ttacttggaggaatcgatattgcaaacactgcattaacaaatatggtcaatttatatcctgccaatgcaattgcaacaggaggtactggatggacggcatttccagaatttggaactccattt

SEQ ID NO: 76051 - DNA, 102 bp, Methanobrevibacter gottschalkii
  source 1..102: mol_type = genomic DNA
aatgtgtatttctatgataagttaggtaaaattgcagtagatgttgttggaggaaacattgataaggttattccaacatttattacaatggcattgcctgaa

SEQ ID NO: 76052 - DNA, 84 bp, Methanobrevibacter gottschalkii
  source 1..84: mol_type = genomic DNA
aaaaagactgcacttggacttggaatttgtaaatttgtctttggtgttgaaacattgctgcctgttgcaccatggccatttatt

SEQ ID NO: 76053 - DNA, 1026 bp, Methanobrevibacter gottschalkii
  source 1..1026: mol_type = genomic DNA
actccttctagtgtggaaacagaaggctctaaaaatataactgacatgttaaatagaactgttgaagttccaaatggggttaataatgttatagctacttctccgccaatgactactgtattatatatgctttcacctgaaaagttaaaagcagttaacttccaatggactgaagatgaattgaaatatgtgccatctgaatatgccaatttaccagttgttggtggttggtatggtacacaagatgggagctatgaagaatttattgctgctgaacccgatattgtgattgaatctattgatgaagggggggatggtgatgcattcactgttcaggaacgtcaagataaatttggcaaaattccagttcttgccgttaaagacactacaaatgttgaaaaaataggagattccatttcattcatgggtgaagttataggtacggaagacaaagctaatcaacttaatgagtttaatactaaatatttggatattgtacatgataaatcatctaaattagtggatagtaataaaaaaacagtttattatgcagcgagtagtgatggtttacaaacttacccgtcaggtgcttctcatggtcaattgattgatttgattggggggaaaaatgttgctgattcattaaatcaaggtaatactacttcaggtgtacaagtatccattgaacaggtaattaagttggatccggatgttataataactaatgatatgcatttctataataaagtgtataatgattcaagttgggctcatttgaaagctgttaaaaataaaaaggtttatgtatctccacaatctccatttaaatggtttgataaacctgttggtgctaatatgattattggtgttccatggactgctaaagtaatctatcctgaagattataaagatattaatatggtggatgtaactaaagagttctatagtaatttctatcattttgatttaaatgataatcaggcaaaagagattttacttgattcaggacttaaagaatcaaattta

SEQ ID NO: 76054 - DNA, 108 bp, Methanobrevibacter gottschalkii
  source 1..108: mol_type = genomic DNA
ggcagatatcctattagtccaatagatgtgataaatactatattgtgcccaatattcccacaattggaagtttcaccaactataactactattgtctttgaaattaga

SEQ ID NO: 76055 - DNA, 72 bp, Methanobrevibacter gottschalkii
  source 1..72: mol_type = genomic DNA
atagccgatccagatgataaattgcccgagattgtttactggttaatgggaagtttggcttctattacgatg

SEQ ID NO: 76056 - DNA, 1938 bp, Methanobrevibacter gottschalkii
  source 1..1938: mol_type = genomic DNA
caggatatatctaattcaacagattttacttttcaaaatagtaattttgattatttggaaaaaactgatagtgttaatttgattagtacttcagataaaattagcacacatattgatgtggtaagtaatactacatttgatggtactgtggactattttaaaattaaattgtctgatgaaaataacaaatcagttccaaatgctaaagtgatatttacagttaatggggttagttatgataaaaatactgattcacagggtatctcttcacttcaaattaatttggctgatggttcatataaagtcatttctaaattcgttggagactctaattataaatcttcatcaaaatcaacaacaattactattgataatactcgcattgtagaagatggattaaacaatgctgaaattcaaaatataattgatgatgctaaagaaggtaatgtgatattatttaaaggaaatagttattcaaatatcaatttagtgattaataaacgtcttacactaatttctactgttaatacagtattaaaatcaagttcatcatctccaacaattacaattaaaggaaaagaagcttcttattcaattgttaaaggatttaaaattcaaggaaatggtgatggtgttgtagtggatggatcgaattacgtaagaattttaaataatgacattactgctgatggagtaggaatcacggcatttaatgttaaatatatcaatattactggtaataatattgttaaaaatggtaaatgtggaattattctttattcaacagagaaatcttacataatcaataatgtaattaacaataataatgcaaatggaattgtattgacaaaatctgatattacatatatcgatagtaacactatttcaaacaatgctcgttatggtattttattaacaaacaaattcaatggtaattcttataaaaatggtcctgaaaatgtttatattactaaaaacactatcaataataataaatgggatggtatttctgtaaataatgcagaagataatattaacattaaaggaaatacaattgttggaaatgatgaaagtggtatttctgttaatgttgtaggttcctacaaaattcaatctaatattataactaatagttatactggtgttagattcgatgaggatcatgttcaaaagaaaaaccaagaaattacttataatgcaatttatggaaatgctcatgttcaaattgaagctaaatcatataatggtgttaatcctttatctgtaggagataattggtatactgatgatggattattatgtcctaaaatcaaaacaaataatttaaaatttactgtaactcaaattggaaaaaatcaattccaagcaacttttgttgattctaatggcaatattgcaagtttactccctgatagggagttaaaatataaaaccaatgatggtaaaatcgcaactgttatgattaaaggaggaataggaacatttactgtcacggcttctgatgcagatattattaagtctactgtggatcgcacaagcagaaaaaatgtttatgattcgaattctccaactaaaactccacaaaatggtcaatctccaacatatgattatcctaacatagattatggtggaggacaaggcaatggaaatggtcaaggtggaaatgcaaataatggtaatgggtcttcacaaaaatctagtgatgattctggaaatagctcaaatagtaaaaaaatggaaccaaatagtaatccagtaaatcaagcaaacgatgtatctcaaagttatgacacttcgcaaagcatggctcgagctgatgcatctgagattagtggtggagcaaattcaggctcacaatctattgcaaaacaaattataattgaagatgatgaattttttatagttaaaggtctttcattaatagtattgttaatatta

SEQ ID NO: 76057 - DNA, 1374 bp, Methanobrevibacter gottschalkii
  source 1..1374: mol_type = genomic DNA
gtgagtatcaatgataatctaggagatgcatcatcagatttagaaaatgaaatcattaattcaaaaaatggagatataatattgataaaacctggaacatataatatccacaatataaccattaccaataaaactatcacactccaaggaattggaaatccaagtgatattataattgatggaggtaaacagtcaagtatttttttgataaacaatattactacctgcgtaacatttaagaatttaacattcattaatggtttatcctacaattttggtggtgcaatatgcattaatacaggtagtgtttatatagataactgccagttcatcaacaacacagcactcaacaataccaatgcaggtgccatatccaattacggaaatgaagataacaaagcatacctccttgtaaacaacaccttattcatgaataatcatgcagaccatgatggaggggctgtaacaacatgttacgctaattctgacatgtataattgtgtatttataaataatactgcagttagagatggtggagcagtgcgagttagtgtttatgggtatggccatgtagaagattgtatttttatgtacaatcatgctgatgagtggggcggagcatactacagttggtcaggtacttctaaaatcaatagatgcatatttatgaacaatactgcaggaacaaatggtggagcagtaatggtttcaggcaatttagaccttgaaaattcaattattgtaaacaatagtggtggaaaaactggaggttcattctacattcaagaaccaatgtatcaagcaaaaacctatattaatgttaacaataatttaattacaaataattcttcacctaaaggtcaagaaatctatgtaaaatggagacattcacaaaacttataccctgactttaatgataatgattggggaagcgaagatccaaatgattacaaaataaatgacccggataatgttactgcaagaagtaaagtgaaaactacaactgataagtccaatttattagatgaattgaatttcaatgcattaaacaaatactatgatttaattaaagattacttcccagaaaactatttagaaaatatcaaaaaacaagcagaatcaaaagctaatcaaaataaagaaaacaataagaacaatactccaaataacaaagacgaacatggacttaaagattcaaacaataccaaaaatagtttaaatgattctaaaataatattatccaataaaacaaccgaaaatatagaaacagagaattatttaatttcttctaattcaaccacacccataggagatgatgaaaaagcatatgaattaaatgaaacaaaaagtgtttccaaatcccaatctccaaga

SEQ ID NO: 76058 - DNA, 2841 bp, Methanobrevibacter gottschalkii
  source 1..2841: mol_type = genomic DNA
gaggataataatgtaacagaaaatgcaacgaatgaagattttcaagctattcagattttaattgataatgcaaatcctggtgattcgatatatttagaaaataaaacttatcagggtagtggatctccaataattgttaataaatctgttaatgtttatggggttgattcttctaagactattttggatgcaagtaacaaatcaagtatttttttaatctctaaagatgttaaagttaatttcaatggtttaactcttactaatggttataatgaaactaaaggtggagcgatatataatttaggtattttaaatattaccaactctaaaatttccagtaactatgctgaaagtggtgctatacgtaatgagggtactggtaaattaactatttcaaattctttatttgataaaaattgcggaagttttggtgcagctattgataattatgtcgggtatttaaatattgttgatacaacattcacaaataatgattgtcttgaaggtggagcaatctataacagatttggtgaatttttagtttataattgcacatttattaataactctgcagctcgtggtggtggagtttataataatagaggtggcatgtatatttacaattccagattcatagcaaataatgtttatgatttaggaggaggaattaaaagttggggttcttgtgaagtgtataatacagtattaataaataatactgcaaaacaaggtggaggaatttatgtatctgaatttacattaattgctgaaaattgttttgttgaaaataattctgctcattggggtggtggaatcgctgttgaagcaaaagctactgcaaaaattaaaaatgccactattataaataacttggctgaccgtggtgcaggtattgatataaatatgggatctattgatttacaggactccattgttaataataatgttgcaaaatatggtgcgggtggaatttactttgctttgttgtcttcaacagtaaaaaatacttatatatgtaacaacatcgctaatacatcaggtggaggttgttatatttatggatttaggggtgttgttgtaaatttcactaatgtgattattaataataattctgcttctaaaggtggagcaatttacagtactggaactgcaaatattcaaaacagtattttaaattcaaataatgcttataaaggtggagctatttataatgaacttaatttaacagttaaagattctcaattttttgaaaatacagctgatagttggggtggagctatttataataacttaaattcatttatagataatgttgttttaaattcaaatgaagttaaacaatttggtggagctatttataatgaaaaattagtcaatgctaaaaattctctttttgaatcaaataaagcattacaagcaggagcaatttattctacaaatgacttaataattgataattctcaatttatcaaaaattatgttaaacgtaactattgtgttctaatgcttagtaaaggtgatgtgaatattacaaattcattattcaaattcaacacaaatgctgatgaagggggttgtatttttaattataatgcaaatttattaattgatgcttctcagtttatttcaaatgatgcaagaagttatggtgcagctattgataattctggtaatttaactataaaaaattcattgttttataaaaataaagcatatggtgcagcagctattgataattcaggtaatttagttataatcaaatctaatttcactgataatgttgctactaataatggtggtgctattgacagcaatggtaaattgattattattggttcaatttttaagaataatctcgctggaaataatggtggagcattaatacttagaggagatacgactgtaacccattcgattatctataataatcatgacaaaaatggttatgcaattttcaataaaggtgttgaaaatatatctctttcaaataattggtggggcagtaataatcctgattttgaaaaattattgaacatgggaacttctgatgattttaattggattattatgagtttttcaagtaataatcaattaattcaatataaaaattctattttgaatataaatttcgataacgttaaagataaaatgggtaatgtttataaaattaactcaacagaattgttgcctatttttaaaatagcattgtcaaattacggtgaggttactatatctaatggatttaaatctatgaataaaaatattccattaatcacatctatttcagcaaaaattgataatcaaagtattattttaaaaattactccaacaaataaaagaataattgataataagaacattgttgttgattataatggaaaagttacttataaagttcgtgttgttggtgttgatggaaaaatcgtcggcgcaaatgtagctgtggttatgaaaattgcaggtaaaaaatacactgttaaaactaataaaaatggttttgtatctaaattattcagtttaactccaggtaaatattcaattattacaacatataaaggatttacagttaaaaatagtataactgttaaaaaagtattatatgctaaaagcatcactaagaaaaaatctaaaaagattacatattctgtctcattaaaaataagcaatggaaaaccaattgcaggtaaaaaaattacttttaaaattaagagtaaaacttacactgctaaaactaataaaaaaggggtggcagttgttagctttaagaatttaaaagtgggtaaatattcagttattgttaactatttaaattcaaaggttaaaacaactctaaaaataaaa

SEQ ID NO: 76059 - DNA, 4338 bp, Methanobrevibacter gottschalkii
  source 1..4338: mol_type = genomic DNA
tcagatgatagtaatttaacagatgatttatcaagttttgcaagtgattttgataaatcaaatttaggtcagaatatcgaagtgaatttagataagttaagttttagtgaagattctcctttatcggatactataattgttgaagaagttgaaaaagatcacaatgaaatggatgattcaacaatacaaaaagcaatcaataatgcaaaggcaggagatacaataattatcaatgggacaagttatgtgcactgtcactttattattgataaaaaattaacaataataagtaatgttggaacaactatggaaccatgtggtagtgatgctgtatctggacataggggtattttttatatttctcctgaagctagtgggactgtaatcagtggttttactatacgaaatgatgttgctaaagctgatgattatggaattcttgtaagaggggcggatgatgttaaaattcaaaactgtgttatttataataatggattgtcttctgatgcaattagagtggaaaatacaaaaaacacagtaattgaaaatgtctcaatatcaaaagcatttaatgggattcgaattctagattctgaaaatgtcaacataagtgattcattcattgataatgcaaaatattgtattaatgttattgactctaataaaattaacttagtttctaataatattactaataataaaatttcaggaattgcaatttcaggttcaagtaaaaatattaatattctttctaataacatttctaaagggcatgttggtattaatttaaccgtagctaatcatgtttatattatcagtaattatatcggactttcggataaatatggtgtttatacaaattgtaatataactaaaatggaaattaaaggtaatttcatagataggaatggtaactacaatattttcaatgatcatcgtgttaaaaatttatttgtaaacggcggggagaataaacaagtaattaataataattatatgattggtggggataatcaagataggccagtatggcatcaagtttatgaatatcgtcctggaaagggtgataatacatataatcctgaaacagatacttatacttatgttggggaggataatggagattattatggtcatcaaagtggaacatttatgggttatgtattagctattaatcaatttttgcaatgtccaaacatatatttcactttccccactaatggtgtaactccatggacaaaaactggaaattataatttatatttaagtgaaattactcaagttaaaaaaggagtatattcaatttcaatagttgatgttgatggaaatttagctgaagagattagttctgtacctgttactttttatttaatgaaaaataacacggataataatggtaaacaaaaagctcctcaagaagatgatgtttctaaagttgtcatgatgaaaaatggtactgcaactgtgagattttacccggatgagtttaaggaatctgataatattttacttgcaagtttcccaggtatcggcaataacatatattctaatatgtatagtccatataaattattcagcattgatgataaattcatcccaggaaatgtaactgaaacaaaagtcactgtttctaatttaaatacatatcctaactcaaatgcaatttttaaagtaattttaatagatttaactggtaatgctattgcaaatgagttagtaaacttcaaaattaatggtaaatcttatggtgctacaacagatgttaatggtgtagctaaaataaagatttcacaatcaaaagaaggaacttatacaatagctgtcaattatattggtgatgatattgattatacttccagtagtgctcaagctaaagttgccgtcaaaaaaatatctactaaaattctatcttcaaatgtgtatatgattccaaatattgctgaatattattctatcactttaaaagatgcatcaggtcatggaatttcatatcaaaaagtgacttttaaacttaataagaaaatatacactgtaaaaacaaataaaaatggtgttgcaaaacttaaacttaaatttactaaaaaaacaacttattatattcatgttaattttgaaggaaatagtaaatacaaagcggtttcaaaaacaaataaaataattgttaaatattcctctaaaattgctaaattaacagttcctaaagttacaattcttccaaaaacatataaatattacacaatttctctaaaaaatactaatggtaaaggaattgcaaaacaaaaaatcactgttaaattaaatggtaaaacttatattaaaacaacaaatggtaaaggtaatgttgcaattaaagttaaattctcaaaacttggagcctataaagtatctgcaatttacaaaggaagtaaaatttataaaaaaacttcttcaaatggtaaaattgtagttgccaagtcatctactaaatttacagctcctaaagttacaattcttccatatgagaagaaagtatacactacaactttaaaaacaagtgctggaaaagctttaagcaaacaaaagattaccattgttcttaatggcaaaacatattctaagacaactaatagtaaaggtcaagctagtattaatgttaaattttcatcagaaaatgtttattctgttatattgaaatattctggaaatggatattataaatctagtaaagcaacaggcaccataacagtttcaaaaatatctactcagctaataagttataataaaacatttgctattgattcaactaaaaacttcaccatatctcttaaagataaatctggtaaaacattatcaaatcagaatatcacttttttatttaataatcaaaatttaacaaaaataacagatgaaaatggtattgcttctgttaatttagatgcaaatgtaggatcttttgaaataatctcaaaatattgtggaaataatcaatataaatctatatccaatacaaacatgattacaatttctaataaaacaaatgttgtatttgttgatgcaagtttgccaaattctgaaattcaaaaaattttcgatgattgtaaaaatggaagtaatgttgaattcttagggaacagttataatgatatttcattaaatattaacaaaccattaaatatttactctgaaaatagaattactttaaatgctaaatcaatgagtccagtatttaaagttttagcatctgatgtgaaaatttgtaatttatccattgttggaaactcttatgatggaattgagattaacaatgctgttaatgttgtaatatttgaaaataatattttaaatcgtttggatcaatctaaaataggtgaatatatgttgagtacaatttctcttccagggtatgggataaatgttattgactcaaaaaatgttgaaatttctaataattcaatcaacacatttgaaagtggaatttttgtttcaaattctaataatttaagtattaactcaaatgtgttaaaagaaaataattatgggattaagtatggatttaatgtttcaaattctaacattacaaacaatatgatttctgaaagtattggtttatatacaaatttagttcctgaaggtccgcgcggatatggtgtatttttaaataattctgcagtaaatgtaacaattgctaaaaataatatttcttggaatcatttagggatttccattgatgcaaattattcaacaggtattttaataactagtaatttaatttctgataatgtacttgagggaattaggtttaatgaaggttatgatttggctaaaaatgctattgaacctgttgtgactgataatgcaatatatagaaatggtagaggtccaagtatgatgattttaggtgaattaagtgcaaaccctgcaggaatttatggtcctggtgcatttaatgattctttaaaattaaaattaggtgctaattggtatggtaaaaatctgattgttacatgggataatgatactggggttgttggttatggaacaatgtgtccaagaattaatacaacaggaattgcatttaaagagataacttgtgtgaatccaggtacttattctattacattttataaaaatgatgaagttgcctcaaaattgccagtatttaatatgtatgctacgttaaatgacaatgttgaaattgtgtttgatgttataaatggtgttggggtgtttacttttgatactcaaaaattcactactggtgaaaatgtaattaaagtgtctagtggttctttaaatgattctgataggatttttaaagttgaaatgtctaagacattagatgatagtgaagttccaatt

SEQ ID NO: 76060 - DNA, 33 bp, Methanobrevibacter gottschalkii
  source 1..33: mol_type = genomic DNA
aattttccatatacaaaatggttatattttgca

SEQ ID NO: 76061 - DNA, 177 bp, Methanobrevibacter gottschalkii
  source 1..177: mol_type = genomic DNA
ggggtatcattaagttttgataatgatgatggtcctcattggaagaatgttactgaagagatgactactaatttaaatgagactgataattttacttatgatgaagaagtagatggtgttgattttaatagtaatgaaacattaactgaactaaatgttactgttaaaccatcatat

SEQ ID NO: 76062 - DNA, 732 bp, Methanobrevibacter gottschalkii
  source 1..732: mol_type = genomic DNA
cttactggttcagtaggtacttcaaatggagacctaaatggccaagatgttcaattagctgctgcagctagtttgaaaaatgtttatgatgaaaaattaatccctatgtttgaagaaaaatatcctggtgtaaaagttactcctacttatgcttcaagtggggatttacaaaaacaaattgaaaatggtttaaaagctgatgtgttcatgtctgctggcaataaacagatggatgctttaatcaatgaaagttatgttgataatgattccaatgttaaatttttagaaaacaagcttgttttaatcgtatctgctgattcaaatgtgaatgtctcttcatttgaagatttaaaaaatgtaaatggcactattgctattggtgatcctgaatctgtacctgccggacaatatgctaatgaatcattacataatcttggtatttgggatgatgttgaatctaaattatctttgggaactgatgtaacagcagtattaaatcaagtagctcaaggatctgctgattgtggtcttgtatacactactgatgctaaatctagtgatgaggttaaagtaatttgtgaagctcctgaagattctttaaaagatattgtttatcctgtagctccaattaaagattctgaacatgctgatgctgcaaacaaatttatggagttcttacaaactcctgaagctcaaagtgtatttgaagactacggatttacaattcatgaa

SEQ ID NO: 76063 - DNA, 69 bp, Methanobrevibacter gottschalkii
  source 1..69: mol_type = genomic DNA
tttggtgttaggggtcctattggtagttttcttatagacttttttgctgtgaaaatagctttttcatgg

SEQ ID NO: 76064 - DNA, 81 bp, Methanobrevibacter gottschalkii
  source 1..81: mol_type = genomic DNA
attgctggtaatattgcaggacaaaccagaactctccctatggcggtttactccgaagtggctgctggcaatatgggggat

SEQ ID NO: 76065 - DNA, 33 bp, Methanobrevibacter gottschalkii
  source 1..33: mol_type = genomic DNA
gtagctggtcttggaccaacggctattgcagga

SEQ ID NO: 76066 - DNA, 57 bp, Methanobrevibacter gottschalkii
  source 1..57: mol_type = genomic DNA
ccattacttgtaagttatggagcaagtggacaaacattaaatgaagcaatagcatat

SEQ ID NO: 76067 - DNA, 33 bp, Methanobrevibacter gottschalkii
  source 1..33: mol_type = genomic DNA
tctcaagttggaggagattatggaatagcaaca

SEQ ID NO: 76068 - DNA, 63 bp, Methanobrevibacter gottschalkii
  source 1..63: mol_type = genomic DNA
cccttatctacattatttgcatatacaccggaaaccaccaatttagttccgggaattgcatta

SEQ ID NO: 76069 - DNA, 1113 bp, Methanobrevibacter gottschalkii
  source 1..1113: mol_type = genomic DNA
caagcatgttggaatccatatgaaaatactaatgaagtagaatttgcaatagctaacttagataacggatcaacatttgaaggtacatatttaaatgttggaaatgaaattgttaaagatttgaaaaataatactaaattcgattggaagtttgtaactgaagatgaactgcggaaaggggttcatgatggggattattatgcaggcattataatacctaaaaatctgagtgaaaatatagcatccattacatctgataatccaaaacaagcggaacttgaataccttgtgaatatcaaatcaaatccagtagctacaaaattaacggacacaggtgcaaatacagtttatactacagttaatgcaaaaattgttcagattataaaccttgcagcttacggaaaactcggagatttaaaagatggtctttcatctggtgcaggtcagttatacagtggtggaagccagctttctgcaggtgctgcaaaaatatcttccggtgcaggacaagtatcctctggagtgagtgatgttcaaaatggagcaagccaagtgcaaagtggtgctaatcaagttcagcaaggttcatctgcaattaacaatggtgcaagtgatgttaagcaaggatcagcatcaattaaacagagtgctagtgacttagaaaaaggatcacaacaaatacaatcacaggtagatccatcaacacttccagaacctatgaaacaatatgttgaaggcaatattaaacttgcaaatggaagcggagaattagctaaaggttcatcccaattagccgatggttctgtaaaacttgcagatagttcatcgaaattggctaatggtgctagcaatgttgcgggtggtgcaaatcaagtagctggaggttctgttgaacttgcaaaaggatcattaagccttgcagcaggtgctcaaatgctttcaggttctgcatcacaagcattgttctcagctgctggagctctaagttcatctgcaaattcactttcaagcattactggaatcaatgaaactgaacttggagattatttctactccccaataaaattagataggcaggaagtattctcagtaccagattacggatccaatgta

SEQ ID NO: 76070 - DNA, 129 bp, Methanobrevibacter gottschalkii
  source 1..129: mol_type = genomic DNA
ggaactggaggaatttacccaattgaaattatgcaagatttcttccaaacattatatccgtacttgccaatgacatatgctattacattgatacgtgaagcacaattaggtgttgtttggtctaattac

SEQ ID NO: 76071 - DNA, 78 bp, Methanobrevibacter gottschalkii
  source 1..78: mol_type = genomic DNA
ttctttaatgcttctttatttaatacttattcttttcataccatttccgaacttggaatccctaatgtaaattcccct

SEQ ID NO: 76072 - DNA, 36 bp, Methanobrevibacter gottschalkii
  source 1..36: mol_type = genomic DNA
ggcatcattactgcagtaggtggtttcaaattaggt

SEQ ID NO: 76073 - DNA, 345 bp, Methanobrevibacter gottschalkii
  source 1..345: mol_type = genomic DNA
gcatcttctgatgaaataaacgatggtattgctatttctggtgttattattaaaggtaatgatatagttccggttgatactatcagatcaaatgttatgcaggcaggttttagggatggtagtgtaatttatggtgatattttaaaaacttccaaaagggaagtttcacttcaagatgctattcagacggctcaagaatttgcaacacggtcaacagtgcccggtacatctgtacaacctattactgcagctgatgttcaagtggataagaatacaggtgtagttacagtcactgttatagaagatttttcatctgttgaattagacaataaaacaagtggtgga

SEQ ID NO: 76074 - DNA, 1098 bp, Methanobrevibacter gottschalkii
  source 1..1098: mol_type = genomic DNA
gctacttgtaatattatagttatcactgatccttcgggtaatgatcctaatggtgcagctgctggaagtatgtcttttgcagataatatgttccagtcaactttcttattatctagatctaatcattttgctgtactttctggaggtactggtagttcagatactaggttggattctattgttgatgcagttgccagtttggaaaataatgcttctgcagcatcagctgcttcattagcttctcaatttaagggagcacgtcttgttgttggcggtcctaatattggtgctgctgttggaggttcatttaatgcatatgtaattacagttgacgattcaagtaatgatattaaagtaaccccttataatagtggtgtggcaacattgcagccgggtcaaaaaggagctattattcacttgaggaatactgctggaaatccattatatggtactgcagattctgtaagaaaagaaactgcaatgaatattggtaagatgattagggatggttatcctgcaactactattcttgctgaagctatgggtgaagtggctaaagattctggtgaaaaatatggtgggggtggagtaaaccttgtatctggcatttcaacttcagatatgtttacaccaaaagaattgaattccactggttatccgatggatgaagaatattccaaggtttgtgatagctgcggatgggcaatgggttttccagctgcagaagcctatgaaaaatgtcctgtttgtggtggagatcttagaactgtttatgcatatcaggcattaggtgatgcgttaactgttagctctaaagccgttagtgtttcagtctatggaagtgatagaccaggtttagcagaaactactaaagaaattgttgaagcatccgtttctaaatatggttatgatgcatctgcaatttcaggttcaattaatagaggtattaataatggtcttttagtaggtgttgatcatgttgaacctaaagatattaatgtaaaacaaggttcaaaagcagttggagtttattacaaatcacttcctagtgaaagatcatctcctgcgtgggatttaccgattgatggaaatatttta

SEQ ID NO: 76075 - DNA, 39 bp, Methanobrevibacter gottschalkii
  source 1..39: mol_type = genomic DNA
caagtgtatttaatttctcaaattcaattacctttaact

SEQ ID NO: 76076 - DNA, 264 bp, Methanobrevibacter gottschalkii
  source 1..264: mol_type = genomic DNA
atgttacaagcaaaaaaaacaataacagtaacagttaaaagtatccctacaagtttaacagtaaatgatttaacatgtaattatggggaagataattcttatttatatgctactttaaaagacactaaaaataataaatttctaaatgggcaaacaatcacttttaaaattaatgataaaattataaatgttgttagtgataataagggtagagccaaaatcaaaattgatgaaaaaccgggattatacaatgtgattgtttca

SEQ ID NO: 76077 - DNA, 432 bp, Methanobrevibacter gottschalkii
  source 1..432: mol_type = genomic DNA
gcaagtattagtaaaaagattaatgttaatgtaatatcattcaatccaactgtgaattatgatgggggattttacaataagtcatatttaaatttatcattaaatatcaataatgctaaattgattaagtattgtttgaataatgatagttggagtcaatctgataaatcagtatcatttattttaacaaatgggatctatgatttatattatagtaatggtagtgggagtattttccatgaacattatttgattgacaataattgtcctgttgtttggagtaattttggttcagacttatatgattcttctattattgttaatttgtccagttgggataatcttgatgccaatcctaaaatttattattcgttagatgaatccaattttaaattgtatgaaaatttattgaatatttcaaggacaacatta

SEQ ID NO: 76078 - DNA, 60 bp, Methanobrevibacter gottschalkii
  source 1..60: mol_type = genomic DNA
aaattttattcaattgattttaatggtcataaaagcgaaacaaaaacttgtaattatatt

SEQ ID NO: 76079 - DNA, 633 bp, Methanobrevibacter gottschalkii
  source 1..633: mol_type = genomic DNA
ggaagaggatttacaacaatccaatcagcaattgatgattcaaatacccataatggtgatataattaaaattagtgaaggtttatacaatgaaccattaactgttaataaattcgttactatgattgggattaatgctactttaacaagtagggatccttcccgtccagttattggaattactggtggtggaagtaatagtgttatttatggatttaaaattaaagattcggagcatggtgttgttatttatcatgcagataatgtttctgtaattaataatcaatttatcaatgtggttaaatctatagaaatagatgatgataaaaatactttggttgcttataattctattgattcagataaatttttaaatttcatgtctggtgttgctattagaaaatcagataatctaatggtttttaataataatatttcattaaattctgatacgggtgctggtggaatcgttgttacaaatattacttcaaataatatttctattgttaataatagaataaccaataaaaacaatttaaatggtattggattgtatgttatctgttcaaatgtaagtattgattctaacaatgtttctaattttaatgctggattgtatgttgtttcatctaat

SEQ ID NO: 76080 - DNA, 462 bp, Methanobrevibacter gottschalkii
  source 1..462: mol_type = genomic DNA
aatgaatttaaaaataataatcatggagtatttttaagagtctcagttaataatacttatgcttttaataatattcatgataatatattatgtggttttgttttagatacctctcttttatcgtataatgattcatgttacttgaatagattatgtgataattctcaatatgatttttactcagaagcaaacagtgattatgtaattaatgataattggtggggtgaaaacactcctaaaatttctattaatcgttctattcttgctaacatttataatgctactggaaatgtaattatgaactcttggatggttgcacatttattttcatcttcttataaaataaatgaaaataacaatattgaaagagctaaattttatgttgatttaacttataataatataggaaatgatttgtcatataaaggttatattccaaataatttaaaatcttttattgga

SEQ ID NO: 76081 - DNA, 186 bp, Methanobrevibacter gottschalkii
  source 1..186: mol_type = genomic DNA
gttgattttgaattaaatgatttatttaaaaaccatgaaaatatcactgtcatgtctatttttgacaatgtaaaaatactaaactcttttaataaaaaggttacaattgatataatgctattttcttctgcatgggattttgaaaataattattttgtaaataagacttatcagattccattcagc

SEQ ID NO: 76082 - DNA, 1194 bp, Methanobrevibacter gottschalkii
  source 1..1194: mol_type = genomic DNA
acattttgctggtctgaaacaggattatttactggtaaaatttatgtaatagttaatggtgaaatcttagatgaaattaatatccacaatcttttttatcaaaaatttaaaaataattattccacaaatgtttttgaagctattaagttgctggatactgtttttgccagtacgaaagaaggtgtttgggcacctaatggttattatttcagttttgcaaaagcagctaatattgattttagagattataattctgtttataatagatttttaaattatattaaattatattatgatttaacagactctgatttaaattttgttaaaaattataaaggttttttcattgattttattgatatgactattgattttcatggtgatatgactccagatattaactttgattataatggagttcataaacttttaaagcctccatctagttatgctcatcgtataagtaatatttattacactgatattgaagatgaaaataatattagtattggttatgaaggtatgcgcagttttgcaattgttaaagataatttaactaatgatgatttgcaattttggttaaatcaaaaagaattatatgctccaggtttgatgaaagccgcttatggtacttttttaacttctttgttagtgatttatgaaaatgaccgtgtggctgatgaatctgcaattaaatttaatgtgacttggtctcgtattagtcctgtttgtgtttctttgtgtaatgattataattgtttatatgttactggggagtctgatcatggaatgggtcgggaagcgataggaaatattagtgatgtttggaagtttaattttgcaacaagtttcagtttcagtctggtggagcagttggtcggtaataatatttggaatgatacgacaataggtagtgttactcttggtttaattgaaagttattttaataatgaaacaatggaaatttttacaagtaacggatatatatttattaaatgtgagaatgacggtaatactttgttgtttttagatttgaagactggaattgttcgggactatttcagttattatggtttacttgggacaatgccatgttatcatgataacataacagaaaatgcatggaaatatggaaataatctattaaataatatgggcagagaattcaatgatttaaaaaatatttttggtatt

SEQ ID NO: 76083 - DNA, 312 bp, Methanobrevibacter gottschalkii
  source 1..312: mol_type = genomic DNA
ttgccaattatcatgtttttattccctgaacaggttaatgaagtatggatgaactttgcaagcttatttaatccatattataaggattatcctgatattccaatttatgaaaatacttatcctgcaaatataataaatcctcctaaattagtattagatggtaaatcatcagatgattatattatttcacaacttaaaaataatagaaattttaataataagtataaaagatataattctaatgttaataaggataatataaattttaaaataaaaataggacctattcctagtggaaaaggtccaaaggat

SEQ ID NO: 76084 - DNA, 180 bp, Methanobrevibacter gottschalkii
  source 1..180: mol_type = genomic DNA
ggtaaatatttaaaagaattatataaaaattataaagatgcgaaaagtaaaggtgaagtattaaagtttgtaaaatctaatattaaagaattatttgctttgtctttgtattttgaatcaattgaaactgtaaatttattaataaatttgtttttatatgaaatagaaaaagataaggga

SEQ ID NO: 76085 - DNA, 726 bp, Methanobrevibacter gottschalkii
  source 1..726: mol_type = genomic DNA
gtttcagataatgtagttgaaaatgatactttaagtgttgattgtcaagtaggagaattgtgctcggatactattgaagtttcatcagataactattatattgataataatgttgttaattcatcagatattaactttacagatgtttattccggtaatgttgtgaaaaaagttaaatctacagttaaaacatcgattactgcaaaagatataactaaatattttcaagatggtacaagtgttaaagcttatttgaaaaattcaaatggtaaagttttatctggaaaaaagatcactgttacttattctggtaaaacttactctcgtacaactgattccaaaggttgtgttagttgggatgttaaaaaagggcctggaacctattcggtgaaattttctttcaaagcaagtggttataaaagcagcagtaaaacagcaaaagttacagtaaaagcaatgccaacaacattaacagccaataatcttgtttttacatatggtgatacaaacaataaattaaaagcaacactaaaaaataaaaaaggcaaatcaattgttaataaaacagttgtttttaatttcagtggtaaaaaatatattaagaaaacgaattctaaaggagttgcgtgtctaacaattactgcaaaaccaaaaacataccctacagccatctcatttacaaatgctaattatgttacaagcaaaaaaaacaataacagtaacagt

SEQ ID NO: 76086 - DNA, 4134 bp, Methanobrevibacter gottschalkii
  source 1..4134: mol_type = genomic DNA
gcagatttaaacgagagtgataaattggggtctggtgtaaatgttgaagataaactagaaaattctcagaaaaataaatcaatgtcggatactaatcaaaatcccgcattaaaagcaaaaacttattcagtaaacggaggtacttttagggatattcaaaatgctattgataaatcaagtgcaggagatacaataaaattaagcggtaaatttgtttcaaaaggtgatgataccatttctatgtcaaagaaattaacaatcacttcaccatcccaagcaattttagatggtaaaaattcaacaacaattttaaaaatatttacaggagcaacacaatctaaattatcgaatctgagatttgtaaatggatattctgatagtaaaggcggtgctattgtaatttcagctaaatcaattgcatttgacaagtgtgtttttgaaaataattatgcaaatttaagttcgggagcaatacatactccatatagggcaatagctacacaaggtatgttaattaaaaattgtaatttcacaaataatggtgcaggaattgccgctggagctttaggaatattcggacatgattttttaattgagaattgtgcttttagttcaaattacgttaaaggatatggcgaatgttatggcggtgctattcagataggattggatacggaaccgtcttatggtaatgttagaaattgcagatttattaataataaagctatatcctctactggcttaggtcatgcaggagcaggatgtgttagaaatggttcttcctattataactgtatttttattaataatagtgcggattggggtgctgctttgacatatcatgcatctggcaatttaaataattgtactctgattaataataccgccactaaatatggtggtgctgtagctattatgatgaattacctgaatttcatgaatttaaatattacaaacagtatttttaaaggaaataaagctcctttaggtggtgcggttaaattggatgggttaaatataaaaattgaagaatccacatttgatgataattatgcatctgagtatggtggtgctgttaatatcaatgcaacaaatgttaaaatcataaattctaaatttaacagaaatattgcaaatattgatggtggtgctgtatttatcaaaggtaaagacactacagttaagaattcaaaattcatatcaaatgaagcaatacctgatgttaaaaaattaaatgatggattaggtggagctatttatgtaaacagtacaaaagtgcttgctcagaataatgagtttaaactaaatactgcaagaaatggaagtgcaatttactttgatagaaatggtcttgaatttaaactggtaaataatacattatatcaaaatcaggcttgggtttacaggttaccgatttttgctcatgatatctattatggggagtcagaaaacatcaaatcagtaatttatggagggaataacattgcagattttgataatttaaaagtatcaaatgcaatttataatgcagccagcaataataaaattgaaattgatggggaacacccagttttaggagcaactaccagcggtaagttatatcaggatgaccgtgaatataatgtgagggtattgatgatggtaagacatgaagatggaactattgtatacaataactctttaaacactaactatctaggtgcagtatctggtaagctggataatttaaagcctggaaagtattatgttaccgcaaaacattttgaagataattactacaaagcaattgccaatacaaccgtattcaatgttcttccaaaaactgataataaaatcttaaaatcaagtaatggaaactcaattgcttataaagacacagtcatctggacattgaatattacaaacaatggtccaaatgattcaaccggtgttgtagtatatgatgtacttcctgaaggattaatttgggtaaatgatgacagtaatggagcatataatccaaaaactggtgttttaacaataggatctttaaaagttggtgaaactatagttttaaatataatgactaaagttaatgctactggaaaaattgtaaacaaagctaatgtaactggaaatgaatatgatattaatttagacaataatcatgatgaaaaagaaatcaacgtacctcctactgttgatttggcaataattaagaaggtcaatatcaccactccaaactatggtgattcggttatctggacattaacagtttctaattccggtcctgatgttgcccatgatgtaaaagtaacagatattttttcagattcattaatttggattgaagatgactctcttggaaaatataatccgaaaactggaatttggaatattggaactttaaacaaaggcaaaacaattgaacttaatattgtctcacaagttaatcaaactggaaatattacaaataatgtttctgtgacatctcgtgaacatgatattgatttatcaaataatgtagctaataaaactatatttgttattaaatcaggagatttgtctattttaaaaacagttaatgtaagtgatgctaattatggtgaaatagttaaatggactctcactgcatataataatggtcccaacaaagttaatggggttacagttcaggatattcttcctaaaggattaatgcttcttaactacacggcaagtaaaggattttacgatgatggcgtatgggttgtgtgttgtcttgaaaaaggaaaaactgaaactttggagttaatatgtaaagtcaacagaacaggaaatattacaaatattgctaaaatctcaggaatagaatatgatcctaatctggacaataatctagacaatgaatctattattgttccacctgcatcggacatttcagtcataaaacaagttgatagtaaaaatccttactttggagatattataacttggattattgaagttacaaacaaaggtccggatagggcaactaatattagagtaactgatgaattgccagaaggtttaatatttaaagactatgtttcaacttgtggtgtttaccaaaacggtgtttggttcttagattatctaaatgcaggtgatagtgaatatctaaatattagttgtcatgtcgggcaattgggcattattgtaaatgatgtgtctgcaatagcaaatgaatttgacattaacctgtcagataatcattataatgagtcaattaatgtattgccagtctcagatctttcaattgaaaaatttgtcaatgtttcaaatgctaattataaagatttgataaaatggacactgatagtttcaaataatggttttaatgatgcaactgatgttgttgttgaagatattttacctgattctttagaatttattagtgcaaatggtgattatgaagagggtatttggtatgttggtgatttaggtgttggtaattcaaaaacattagatatagttacaagaatcattaaaacaggagatattactaatgtagccgctgtatattgtagtgaagacgatcccgatttgtcaaacaatgaagctgaggatactgttcatgttgggcctgcagctgatttgtcaattacaaaaacagtttctaaacatgcatatgaaattggacaaatacttacttacaatattaatgtaaataacaatggtcctgatgatgcggtaaatgttaaagttagtgaagaattccctaaatctttacatctgaaatcatttaagatgtcagctggtgaatttaatgcttacagtaatgtttggtcaatagataaacttgcagctggtggtgaggaaaaattacgcatggaatttgaagcgttgtctgaaggaatctttaaaaatactgcttctgttgtaagtgatacttttgataatgatttgaataataatcatgattcggctttagttaaaattattgctaatacttcagataaaattataaatgatttaactgataattttactaaaagtaatgttgttaaagctgaaaatatcaaacagccagtttattgtcttgaaaaacattctactgcaaatttcatagaattactatctatttctgtaattgtttctatgatttttggaggaggtgatatttttagaaaaagg

SEQ ID NO: 76087 - DNA, 987 bp, Methanobrevibacter gottschalkii
  source 1..987: mol_type = genomic DNA
gcatcaaaaactgcattcattacatcagataatttaatagatgaaaaaactgatacaaatatgctaaattcaattaagaattatgttgaagagataagtaacggtgaaattcaagtaatcgtcgataacgaagctccaggacctggagaaggttggcgatcaataagtgtaacaagtgatgtgagtattgacatagcagcatcagatgctggaaactacatacaacttgcatctgcagcaactgctggaaacaaacaaattatctttataaacactggtgattttgacttagataaccattctaattttttgagaagagcatgggatgacaattattcaaatgaatcacttgcaggagtgcgtgaccccggaacacttcttaacaatgcaggaatacaatatatccaacttgctaaagactatccggacaatattgataataatggtcttttagataaatatgatgataaaatgaaccatgaaatagctgagaaaatagtcaatattgttaataactatgacaacagttcaacaaaagaattaagtgataatttaatagtaaaaaataaaatatccccaaaaggaatggctgatgcaagtaaaatgcttgttgaaagtggagataaagaaatgaatggaccatatggttcctattcaacaccacaattactttatcagaccagtacttatctcaatggtgatggaattgacattcctaaagactataaaaaaccagacaacccattaggaatttcatttttaaccaaagacacttacagtgtttatgattatttcaaaatggcaggaatagttaaaaattatatggatgcgaatggaaaagcaccagattcgattgaatatgaaggagcccatataagctattatgatttaacatataattttgctaaaatagttcaaaatcatactgatgcaaatcatatgggctttgaaagtgagtatcactttgataaagtaaacgattcaata

SEQ ID NO: 76088 - DNA, 84 bp, Methanobrevibacter gottschalkii
  source 1..84: mol_type = genomic DNA
aactctgcaccagttcttggaggttatgaagccacaggacttggtcaaaatggatttggatctgcatccagtgtaggtttaaat

SEQ ID NO: 76089 - DNA, 60 bp, Methanobrevibacter gottschalkii
  source 1..60: mol_type = genomic DNA
aatcctacacttggtgcaaattttatcacattcggagcaaccgcagtaatcttacaggca

SEQ ID NO: 76090 - DNA, 33 bp, Methanobrevibacter gottschalkii
  source 1..33: mol_type = genomic DNA
tatattggtgttgcaccagatcttgctatacta

SEQ ID NO: 76091 - DNA, 42 bp, Methanobrevibacter gottschalkii
  source 1..42: mol_type = genomic DNA
ggttggggagtaagcacatttccatattcaataggttatgta

SEQ ID NO: 76092 - DNA, 54 bp, Methanobrevibacter gottschalkii
  source 1..54: mol_type = genomic DNA
ttaaatccccttataagaccggtaactcatttatttttaatgggatcatcgaaa

SEQ ID NO: 76093 - DNA, 192 bp, Methanobrevibacter gottschalkii
  source 1..192: mol_type = genomic DNA
tttagactacaaatgggaatcaaacttaacactgtgttttgttctatgtccagcacgatgagttctacaagtattttacatactcatttgttaaagtccattttaggtgaagttttaactaaaataattggaccattcattcaaagcaacatcaatacaggtgttggactatatgcatatgtcccagatatt

SEQ ID NO: 76094 - DNA, 216 bp, Methanobrevibacter gottschalkii
  source 1..216: mol_type = genomic DNA
gcttttgctggtgcagaacccgattattatacagtagaaatagtcaacatgacagataatgttgattttggagacattccaatagaaaaaataagcaatgaaacatatcatgtagattccaattataatgaaatggaattaattaatgatttaaaagtaccattaaataattcctgcaagtactacacagtttcttggaatgcatattcctattta

SEQ ID NO: 76095 - DNA, 33 bp, Methanobrevibacter gottschalkii
  source 1..33: mol_type = genomic DNA
attggtttttcaacagttgatgggggaccattt

SEQ ID NO: 76096 - DNA, 45 bp, Methanobrevibacter gottschalkii
  source 1..45: mol_type = genomic DNA
gctacctgggataatatgtggggacttggaagtcaaactcttgat

SEQ ID NO: 76097 - DNA, 42 bp, Methanobrevibacter gottschalkii
  source 1..42: mol_type = genomic DNA
acaaactttggacaaatcacaaatttcatttcaattaatccc

SEQ ID NO: 76098 - DNA, 1380 bp, Methanobrevibacter gottschalkii
  source 1..1380: mol_type = genomic DNA
gacaatactgaaagtgacattattggagccgatgggttaaacagcacaagcaatataccaatggatgctccaagaacatttactcagttaaatgaagcaataactccatacaccagtattgatttagagcatgattatagatatgataatgagacagattccgaatttgctaatggagttcccattaccaagaatataactattgatggtaaaggtcatacacttgatggaaattatcttgcccgtatttttattataaaagaagattgtacggcagtttttaagaacattaacttcattaacggtaaggcaagcaccaatggcggagcaatttatggagtttgtaatgcagaaaactgcaatttccttaataatactgcagtaaaagatggtggagcaatacatctaagtaacgccaataactgtaattttattaacaattacgtattaaatggtagaggtggagcaatgtataaaggttatgcaacaaactgcatatttactgacaactccgcagtgactggcggagcactctttgaaaactctgcaacaaaatgtaagttcaccaataattttgcaaaagagaatggtggagcattatatggaggatttgctgttcaatgtaattttaataagaattccgcaaagaataatggtggagcactttataaaggttcagcccactactgtaatttcagtgataattatgcagtaaatcatggcggaggaatgtatggaggtgccggtgaatactgcttctttaaaaacaatgcagcaaaatcaggacatgatgcatacagaagctccctcaaaaaaactaagacaactatttatataaagcctacaactactgcccattatggtgattatgtagttataaccttaaaaaatattaaaaacaaagttgtgagtggtgttaaggtaagtgtttttattaatggtaaaaaatatgctacaaaaattaccaacaaatatggtcaaattaaaattgatacacgaaacggttttgttattaaaaaatacactattaagtcaaagtttgcagaagattccaattactacgcatcatcaaaaacagttaaaattactattaaaaagtcaacaccaaaaataactgcaaattcaaaaacattcaaaaaatcaactaaaatcaaaaaatacagcataaccttaaaaaccaaacaaggaaaaattatgaaaaataaaaaaattacattaaatgtcaatcatagatattattatgcaacaaccaattataaaggaattgcaacatttaaaattaccaaactattatataaaggtaaatttactgctacaactggatatgctggtagtaaatattacaatgcattaactaaaaaatccaccattattgtccga

SEQ ID NO: 76099 - DNA, 36 bp, Methanobrevibacter gottschalkii
  source 1..36: mol_type = genomic DNA
attattccattaccatggactccagttccagttact

SEQ ID NO: 76100 - DNA, 51 bp, Methanobrevibacter gottschalkii
  source 1..51: mol_type = genomic DNA
attccatggtttggaggaatgaccggtggatttgaaacattactcggatca

SEQ ID NO: 76101 - DNA, 36 bp, Methanobrevibacter gottschalkii
  source 1..36: mol_type = genomic DNA
aacttaactcaaggcacaagcgttggtattgttgat

SEQ ID NO: 76102 - DNA, 156 bp, Methanobrevibacter gottschalkii
  source 1..156: mol_type = genomic DNA
tatttctattcgtcagataatttccatgagtctgattctagtttaaatgaaaggcatgatgatgtggtttatctctggatgttggatgataacggaaagttgaaactggttccgacaactgaaacttattctgaagggtctgcaagtgatccagac

SEQ ID NO: 76103 - DNA, 1095 bp, Methanobrevibacter gottschalkii
  source 1..1095: mol_type = genomic DNA
ttggaaaataaaatcaacgcaggatacggttccacaataacattagaaaatgattatgaatatgaggaatctggatatagttctggaatagaaattactcaggatataactattgatgggaaaggtcatacaatcgacgccaaaggacaaacaagaattttcgatgtggaagcaggcaaggtaacattgaaaaatattacttttaaaaatggaatgcaaaacttcttttttggtggtggagccattctctggaagtcacttgatggaatcattactaattgtacttttataaataactatgctccgtctggtggagcaattcgcttggaagcctgggacaatacaatatctgattgtactttcataagaaacactgccaatcaaggaggagctataaatttgaatacaactaattacgcttcaatttccaattgtgtttttgtgaataatgatatttactcagtgcaaggtgatggatgtaaaataaacaacaatattttcatgagttgttcaattggttttgactttactcgaaattataatattgataataattggtttgggaataatgcaagtaattatacttataaaccaaatgagttttgtaataattggttgtttttaaatgcaacaacagatcccaacacagtttcagtttcaaacactgcagacattatctttaaattatatgcctataattcaacttcaggaaacatctctaaatatgataatgcgccatttaaaaatcttaatttaacaatcactgcaacaaatggtaatattgataagaatattgctaaattaggagaaactatcaaatatactgcttccagtgttggaactggcaatgtatctgccaaagtggaaaatgtagaatatacaattggattagacatcattccaatagaaactaagcttatacttaattcgactgatacaattattgatagcatcagtactgttggcatcaatgtaactgatattaataataatcctttaagtggtgttgttaaattaacaatcaaagataataaaggtaatgaatacaacactactgtaacagtgaaaactggcattactacttacatatatcct

SEQ ID NO: 76104 - DNA, 1161 bp, Methanobrevibacter gottschalkii
  source 1..1161: mol_type = genomic DNA
aatataactggtttttatcttggaaatgatactttagggtatgttgattctccagtagcagaaaccaaatttagggttgataaacttaacgctactgtaaaccttgtagtaaacaattacacaatcagaaacttctcagtaaacattacagtaactggtaaaaatactgacagaatagtagaaaatggtagtttaataatctatgcaaatagagaaaaaattgacgagataaatattacagatggtaaagctgaaaatatattattaaatatcaccaaaataggaaattatgaattatcagttgcatatagtggaaataacgtattcaatgaaaacaatactttttcaaaaaatgtaactgctataaaaataagtactattatttcagcaaataacattatcactacttataacactgataaatacttagaaattactttattagatagtgaaaaaaatccattaaacaatgcaacattatctgttgacttgaatggggctaaaaaatacacaacttataaaaatggacaaataaaaatagcattaggtagtttagttccgaaaacatacactgcaaaagtaagttttgccggaaatgatatttatagtccctattctaccagctttaaggttgtagttgaaaaagcgacaccaacaataactgcaaaaacaaaaatctttaaatttgaggacaaaaccaaaaaatacactataactctcaagaacaacaaaggaattgtaatgaaaaacacaaaagttactttaactattaatggaaaaacctacactgcaacaacaaacactaacggtgtagcaactttcaaatttaataaattgaataaaaaaggaacatatactgcatctatcacatattcaggagataaatattacaacaaactaatcaaaaaagctaaaataaaaataaaagcacctgcctggaaaacagtagcaaaaggtagcaaaaataaggcaatagttaaaaaaattcaaaagactttgaaaaacaatggatactaccttaagtacaatggaagatacttgaaaatagatggaattttccaaaaatatactcaaattgccgtaaaacatttccaaaaagcaaataaacttaaaacaactggaaaagtagattacaaaactgctaaaaaactaaaaataatt

SEQ ID NO: 76105 - DNA, 48 bp, Methanobrevibacter gottschalkii
  source 1..48: mol_type = genomic DNA
atggcagatcaaattgctactttgataagttctgtaggacttacacaa

SEQ ID NO: 76106 - DNA, 42 bp, Methanobrevibacter gottschalkii
  source 1..42: mol_type = genomic DNA
tcaggattattaggtggaggtcaaggattacctactgaagcc

SEQ ID NO: 76107 - DNA, 81 bp, Methanobrevibacter gottschalkii
  source 1..81: mol_type = genomic DNA
tttattggggacttcccagaaagaattgcaggattccgtttaccaactgtatttgctccagtcgaagcattcaaacatcct

SEQ ID NO: 76108 - DNA, 51 bp, Methanobrevibacter gottschalkii
  source 1..51: mol_type = genomic DNA
cctggaatgcccacatctaagactttactttactatgtttctcaagttgaa

SEQ ID NO: 76109 - DNA, 45 bp, Methanobrevibacter gottschalkii
  source 1..45: mol_type = genomic DNA
ccaatgaagattcctgtagcaaaaggagtcgaaatttcaataatg

SEQ ID NO: 76110 - DNA, 123 bp, Methanobrevibacter gottschalkii
  source 1..123: mol_type = genomic DNA
tcagtaataccgctacatccatatgcattcgctatggccagtggtgtaggcagtgcaagtatgaacgctgcttcactagctccgactgttgcggcatttccacaattagcaactcaaattgag

SEQ ID NO: 76111 - DNA, 45 bp, Methanobrevibacter gottschalkii
  source 1..45: mol_type = genomic DNA
gttccccaaccagcaaccccaacgattggtgctattttaaagtta

SEQ ID NO: 76112 - DNA, 45 bp, Methanobrevibacter gottschalkii
  source 1..45: mol_type = genomic DNA
attccccttgcaagcacaggcagttgggaagctctttttgattta

SEQ ID NO: 76113 - DNA, 39 bp, Methanobrevibacter gottschalkii
  source 1..39: mol_type = genomic DNA
atttcatttaattgggttttaaatagctatggtaatctt

SEQ ID NO: 76114 - DNA, 99 bp, Methanobrevibacter gottschalkii
  source 1..99: mol_type = genomic DNA
atgtataataattatatggatgatttgggtggtgaaattaagtcaaaagaagttaatgaattcaataatcaattaaatgctcttaaggtttatttcaaa

SEQ ID NO: 76115 - DNA, 51 bp, Methanobrevibacter gottschalkii
  source 1..51: mol_type = genomic DNA
tattctaattttatgcaaagctatggaatggaatctgaaatgattatttcc

SEQ ID NO: 76116 - DNA, 36 bp, Methanobrevibacter gottschalkii
  source 1..36: mol_type = genomic DNA
atttatccatctgcatttaactccgaaacatcagta

SEQ ID NO: 76117 - DNA, 42 bp, Methanobrevibacter gottschalkii
  source 1..42: mol_type = genomic DNA
acaatgggtgttgaaaccatagtaagaattattttaggattt

SEQ ID NO: 76118 - DNA, 450 bp, Methanobrevibacter gottschalkii
  source 1..450: mol_type = genomic DNA
actggatcaaccaataaatcttcaccgattcaaaatgttgacacagaaaaatatagtgcaggatcattttcattcaaatatcctggtgattggcaggaactaaaccaaactgatgaagaacatccaggagctatattttataaagcagcaaacaacacaactgttgaatattacaatgtcagcagtagtgcatcatctttaaaagaaataaaccaaaatagaatcacacatgctcaaagtgtaggtgcttctgtcacccttcttgaaacaataacattagatggtagaaatgcatcaaatattatcttagaaaacgctgatggaaactacacaagatatgtttcaatgtttagtaatggagaactatatgtattcagactttctggagattccgtcaattccattacatctgatgaaattaatagtgtgataaattctgcagacatagct

SEQ ID NO: 76119 - DNA, 72 bp, Methanobrevibacter gottschalkii
  source 1..72: mol_type = genomic DNA
gcaactttaggtggaagtttattcggtattttcggaggattaactggatttaccctctcaggaattacaagc

SEQ ID NO: 76120 - DNA, 45 bp, Methanobrevibacter gottschalkii
  source 1..45: mol_type = genomic DNA
ggatatttaggaacatttaaagaaggattttttacaacagaaaat

SEQ ID NO: 76121 - DNA, 318 bp, Methanobrevibacter gottschalkii
  source 1..318: mol_type = genomic DNA
gtggggtatagtattgtttcatccagtattactaatgatatatcctctggaacacaatatgatgagcttgcagaacttaaagctgaatacagcaatttgtctgttaaatttgataatattaaatcaacatattatgcaggtgatgctgatgatgttaaagtttataatgatgctaaactagagttatctcgggctaattccgctattgaaaatgttcaaagtgctttagatgcagataaaccatctaatgatgttgatagtagaattgtttttgctaaagaaaaacttgaatctgctgaaaaggcttataatagtctc

SEQ ID NO: 76122 - DNA, 540 bp, Methanobrevibacter gottschalkii
  source 1..540: mol_type = genomic DNA
catattttttttggaatgcctttggaattttatactgagggagatgcaacttatcatttatctcaatttaataaattggaccttgatggtgatggcaatcttactttttatgaagtaaaaggtttagcatcagatatttcgcaggataatctttcagggatatttgatgccgccgataaaaataacaatggtgttttaaaaggatctgaatttgatggctatcttcagtttattgataaatattataaagaattaggaaagcagcaaaaagctgaaagaaaaaattcagcacaacaaaaaagtagttcttcttcatcaagttctaatccatcatttcaagatgagggacatgaaatctgcccagtgtgtggtggaaatcaatttactgaattttacaattcacaatatggtgaaatgaattggcaatgtgattactgtggtgaaatatttcgcagtgatgatgagttttatatagattattgggaatcaaatggcattaagtgtatattgcctgcactggagaataatttagatataatc

SEQ ID NO: 76123 - DNA, 48 bp, Methanobrevibacter gottschalkii
  source 1..48: mol_type = genomic DNA
gcttcttatggcaacatttttgggcttgctaatatagcagttagtccg

SEQ ID NO: 76124 - DNA, 138 bp, Methanobrevibacter gottschalkii
  source 1..138: mol_type = genomic DNA
gatacatattttggacttcccgagcaacctggtgttagaggggctgggataattggtcaagatgtcgaaaaaagagggggagacattgctggtggatttttccaaggaaacattacatgttctccggatgcatctgct

SEQ ID NO: 76125 - DNA, 270 bp, Methanobrevibacter gottschalkii
  source 1..270: mol_type = genomic DNA
ttaaatcctgatcagttatatgtaagacctgctccacaagagcaaattggtgatggtctatctattgcaccttatgataggggtggagaagtattaactcaacctggacagattaatccccaatatccagataattccagagaactgggaatgataacagcttatatgtctccaatatcacaatgggtatcttcaatttccccatactttggaacatcaatttattcatctcctggtgggctcatagatgaaatattatattatacaaga

SEQ ID NO: 76126 - DNA, 48 bp, Methanobrevibacter gottschalkii
  source 1..48: mol_type = genomic DNA
atggtatttataccacagttcgttcccgctgcattcttaaatatgtat

SEQ ID NO: 76127 - DNA, 72 bp, Methanobrevibacter gottschalkii
  source 1..72: mol_type = genomic DNA
atggattttgttacactcggtggaaatttacttggaacaattccccttggagatattgtattatatttgact

SEQ ID NO: 76128 - DNA, 54 bp, Methanobrevibacter gottschalkii
  source 1..54: mol_type = genomic DNA
gcatcaactggaactttgtcccttgcagtgttatctcagatgcctgtaagtccg

SEQ ID NO: 76129 - DNA, 66 bp, Methanobrevibacter gottschalkii
  source 1..66: mol_type = genomic DNA
gtaaccggttcaatgaacattggggaaattattacttatcagtctgttaatggtcctttagtattt

SEQ ID NO: 76130 - DNA, 42 bp, Methanobrevibacter gottschalkii
  source 1..42: mol_type = genomic DNA
gttaaagttatcaatattggatttttaggtatggaaactcct

SEQ ID NO: 76131 - DNA, 57 bp, Methanobrevibacter gottschalkii
  source 1..57: mol_type = genomic DNA
ttaccgtctccagcgtactatactggagattcaagccttgcatttgtatttacccaa

SEQ ID NO: 76132 - DNA, 252 bp, Methanobrevibacter gottschalkii
  source 1..252: mol_type = genomic DNA
gctagtgatgttaattctacagatttttctcaattaaatgatactgttctagattcaagttttaatgataatttaagtactgttgaaacttcaaacaactcgaaaacagtaaataatacaaataatggtgatatggttcaaattattaaaaccaatcctaaaatcactgttaaatcaacatatttaaaaagtaaagataaattagaatttaatttcaaaaatgcttctggaaacccactgaaatctaaaagc

SEQ ID NO: 76133 - DNA, 48 bp, Methanobrevibacter gottschalkii
  source 1..48: mol_type = genomic DNA
atggtcttcatcggtaataaaaaatattcggtttacactaattctaaa

SEQ ID NO: 76134 - DNA, 48 bp, Methanobrevibacter gottschalkii
  source 1..48: mol_type = genomic DNA
aataaaataatgtatttacgcatctctaaattatcaactagaatcact

SEQ ID NO: 76135 - DNA, 99 bp, Methanobrevibacter gottschalkii
  source 1..99: mol_type = genomic DNA
aaaaaattgattgtaaagtacaaaggaaaaacagttactaaaacatcaaataaaaatggcagaatttcttataaaatcaaatcatcaggatctaaacat

SEQ ID NO: 76136 - DNA, 78 bp, Methanobrevibacter gottschalkii
  source 1..78: mol_type = genomic DNA
tcttcaatttctaaaaaaacaattgtaattaaagttgcgagcaaaaaattttctaaaaaatcctcttctgaggggatt

SEQ ID NO: 76137 - DNA, 159 bp, Methanobrevibacter gottschalkii
  source 1..159: mol_type = genomic DNA
gaagtaaggaagactcaatctacaaactattattgtggtcccaattcagctagtgtttgtactcaggttttgaaaaattattattgtgaaaaatatctcgcaaagttaatgggtacaaatcgtagggagggtacaaaatgtcaatggattattgatggt

SEQ ID NO: 76138 - DNA, 42 bp, Methanobrevibacter gottschalkii
  source 1..42: mol_type = genomic DNA
tttgataatgcattaaatgagcttaaaaaaggcggtgctgca

SEQ ID NO: 76139 - DNA, 33 bp, Methanobrevibacter gottschalkii
  source 1..33: mol_type = genomic DNA
aacaccactgcaggtgcagatgttttatcaatt

SEQ ID NO: 76140 - DNA, 33 bp, Methanobrevibacter gottschalkii
  source 1..33: mol_type = genomic DNA
agtgaaatcggtttagatttagcagtagtacca

SEQ ID NO: 76141 - DNA, 87 bp, Methanobrevibacter gottschalkii
  source 1..87: mol_type = genomic DNA
ggtatggttgattttactcaagcattaactgcaaatgtggttgaaattcctaaattttacttgccatttatgaattataatttaaac

SEQ ID NO: 76142 - DNA, 48 bp, Methanobrevibacter gottschalkii
  source 1..48: mol_type = genomic DNA
gcaacattatccgttgtttatggcaatttgtctcttgctatgtcagga

SEQ ID NO: 76143 - DNA, 45 bp, Methanobrevibacter gottschalkii
  source 1..45: mol_type = genomic DNA
tcatatattctaactggaagttattattattctggtgcaccaact

SEQ ID NO: 76144 - DNA, 36 bp, Methanobrevibacter gottschalkii
  source 1..36: mol_type = genomic DNA
actggagattattattatcctaattctcctcaagac

SEQ ID NO: 76145 - DNA, 36 bp, Methanobrevibacter gottschalkii
  source 1..36: mol_type = genomic DNA
tttggagatgctgtggataattatgttgattcactt

SEQ ID NO: 76146 - DNA, 33 bp, Methanobrevibacter gottschalkii
  source 1..33: mol_type = genomic DNA
tatcagggtcctcagaatattcgatttagcggc

SEQ ID NO: 76147 - DNA, 1701 bp, Methanobrevibacter gottschalkii
  source 1..1701: mol_type = genomic DNA
gtggatgctgataatgctactttggctgaagatgcaattccgactgatgcggatgttgttcaaactaaagttaataatgcaaattcaggagatactattacattggaagacaaaacatatgattttgctaatcaaactgtaacaattgatggtagggataaaatcaccattagaggtactggtaacactattattaaagggcatggtggccaaaattcaaaaacaggtgctttatttatagtatctgaaagtattggtgtaacttttaaggatattactttcattgacaccaacccaaataataatttcacttatgatggtaatgtggaaggatatggtattacttttgatggatcaggtgctgaaaatggtgttgtagataattgtagttttgcagattttaatactgctgttaatgtgaaatcttgtaattatgtaactgttaaaaacagtaaattcagtggtggttatgctactaaacttattaatgatccaactgtaaacaaagaaaagggttctaaagttgtaagtgctggtggatctttattcctcagtgttttaaattgtacttttgatggaccaatgctcgatgcagtatctatctatggtggtagtggagatgctaaaataattggaaatactttcaaagataatgtatatgctattttctttggtggtgcatctactgaaggtactttcattaatgataatactttcattgaatgtggtcaatttgttaaagatgcaaatactacttggggaggataccctgtaatcagtatagaaaaagcttctgatagtgtttacatgaataataatactttctatgcagttaataataataaattaattgcagctgaatctgctaatactgctcatggcgctccaagtactttaggcgatattaacatcactaactctaatgtaaatcttgctaatgataatgttgttgctggttctgtaactttcttacatattttaagtagaactggagacatcaatcctaaagctcctattactttaactggaaataaatatgctaaaggtgttaaagctgttgttgtatggtacaatgactggggtgttgaagattcagaaaatattgtgattccacaagctcctgaaccaactcctgctcctgttgctgtttcaacttctatttcttctgctaatttagctatttatgctggtaactccggtaagattaaactcactttaaaagatgcaaatggtgttgctgttgctaataaaactgtaaatattgtaattgatggtgttgctaaaactgtaactactgatgataatggtattgcaattttatctgttaaatattctaattctggaactcattatgctactttagctttcactggtgataatgattacactggatctattaaaacagttaaaattagcgtacttaaaaaagtcactgctttaaccattactaaaaaaacatttaaagttaaaactaaaaataaaaaagtaactactgttcttaaatctggtaaaacagttcttaaatacaaaaaggttactttaaaagttaaaggtaaaacttacactgcaaaaactaattccaaaggtattgctacttttaatattaaaatagctaaaaaaggtacctttaaagcattaactaaatttgctggtgatggtgcttacaaagcagcaagtaaatatagttatgtttatgtaaga

SEQ ID NO: 76148 - DNA, 57 bp, Methanobrevibacter gottschalkii
  source 1..57: mol_type = genomic DNA
gattccactaaatctctcaactatacttcatttaaggcttttttaattttaactcct

SEQ ID NO: 76149 - DNA, 60 bp, Methanobrevibacter gottschalkii
  source 1..60: mol_type = genomic DNA
atgattattcaaggaactgagacattaacttcgattattcatatattttccgaaagctta

SEQ ID NO: 76150 - DNA, 51 bp, Methanobrevibacter gottschalkii
  source 1..51: mol_type = genomic DNA
ccaggtcttgcagcacttggaacgggagatattgcaactcttgctcaatca

SEQ ID NO: 76151 - DNA, 177 bp, Methanobrevibacter gottschalkii
  source 1..177: mol_type = genomic DNA
gcattatctgttaatccagacatgattactgagcaaacccaaacaaaagaagtttcaacagcaaatacatttactcaaaattatactgatgctggtggactggaagatagtggatatagtgaagttggtaaagtttatgaggatccaagtactggtaaactggtaatggtatcaggt

SEQ ID NO: 76152 - DNA, 306 bp, Methanobrevibacter gottschalkii
  source 1..306: mol_type = genomic DNA
tttcagtttaacaataatgtttcaacattcatgattgtcaatgaaactcatgtaactgaaaacagttcgttttctgggatgttagtcgattcttatggcaatggcgtagcgaatcaaacaattgcctatcacgaacctggagggaatgtgggaactctaactactgatgaaaatggtgagtttactgttgaacttgccaaatatttatccaattcaacaagtgacaattattatggtgatttcaaattctctggaaatggcaaatatcagggatgcgcatatgaaggtaatgttactgtaggaatt

SEQ ID NO: 76153 - DNA, 42 bp, Methanobrevibacter gottschalkii
  source 1..42: mol_type = genomic DNA
gcatatacaagtccagaaatccttaataatataaatacatca

SEQ ID NO: 76154 - DNA, 69 bp, Methanobrevibacter gottschalkii
  source 1..69: mol_type = genomic DNA
accgcacttagcggagctattcaaagcgacatatcaaatcccattcaggacctgattaattcaactgga

SEQ ID NO: 76155 - DNA, 45 bp, Methanobrevibacter gottschalkii
  source 1..45: mol_type = genomic DNA
ttaaacagtagtgtgactaacctcatcaccggtacaatcaatcca

SEQ ID NO: 76156 - DNA, 90 bp, Methanobrevibacter gottschalkii
  source 1..90: mol_type = genomic DNA
ctggcattgttctcttcatatattttgcccggaccgcttgatgtggtaaattcagcattagtagtaatagaaaatggtaaactcttgaca

SEQ ID NO: 76157 - DNA, 60 bp, Methanobrevibacter gottschalkii
  source 1..60: mol_type = genomic DNA
ggatcaagtagtggtttaggttatatgattttaattgcaacaaacctttttgatacaggt

SEQ ID NO: 76158 - DNA, 2904 bp, Methanobrevibacter gottschalkii
  source 1..2904: mol_type = genomic DNA
gatacagatttaaatgcaaatacattagaaaaaagtaatgatgtgactatattaaatgaaggcgatagcaatgttagtcaaatacattcacaacataccgttaaagttggatcagatagtgattccatccaaaatacaattgattgtatgaacgatggagacatacttaattttgaaaccggaacttacaaggatatatgtatttatgtaaacaaaagcattacaataaatggtaatggagcggaattaataggatatgacactccttctaaaagcaacactcctgaaattatctacaacgataccggtaaaggaggatatgcaattggaaattttgctactttatacattgttaaggctgacaatgttgtaattaatggtttgaaaataaccggcggtgcaaatagtacttccacttattctaatgcattaatatatgcaatgaactcaaaaaatttaactttcaaaagcaatgttttagagggatcttcttggggattatacttccaatactgcactgacggacatgtaacaaacaacatcattaaaaatcaggcagtgactggatttttaaactttggatctgcaagaacctcaattgaaaacaacaaagtaatcaatgctaaaaaccatggcatcgatgtaagacatggtacaggaccaaacgttaaaattattaataacacagtaattggttcaaaagaaggaatctatttaatgcattctacaggacatgttgcagctaacaacactttaataaactgcactattagttcaattagttgttacggttctaaaaatattaaattaaatggaaataaaatgcaaaaatctagaattggcgttttactcggaggaggatacgagaacatcactgttggtgaaaacatgtttactttagataatttaccatatcctccaacatttgcatattatattgcagaagcaaaatctgaataccagaatgatgaagatataatgggtacttttagtgacagttctttatatactcctaactttgtagcatttactggaattgacgtccctaaagatattggaattaattatgatcccattttagaaaaaacaggaccagaatggatagttccagaaggagcttcaagttctgagattcaaaatatgattaataatatgaacaatggcgatactctaagtttcactcaaaatgctatttacaatgaaatttcaatctacacagacaaaaacattaaaatattaggtaacaatgccactttagtcggatgcagtggaattaactttaacaatacccactacttggataatgtagctgaaaaagttagaaaatcaactaatgagggtggatatgcaataggatacaatgcagtattatacatattgaatacaaccaatgttgttgtaagtgacttaaatattaaagcacaataccctaaatatgattctagcaaagttgaaacaactactaatgagtataagacagtggggatttatgccgattccaattcaggattagtaattactggttgtgatgtaaccggtgcttcttggggtattttccaacagtattgtaaaaatagcaccattatcagaaataatattcatgacatttacactacaggcattatgaactttggttcacctaatggaattattgccggaaatacagttactgatgctgccaatcatggtatcgatgtaagacatggtacaggaccgaacgtgactatctttaataacacaatttcaggtgcaaaagaaggaatttatcttatgcactctaaaggacactctgcatacaataacacgattctaaattgtaaaatcagtgggattacagcctacggatctggaaatgaagtgctttttaacaataccatttctggaagtagacttggtattttgcttggaggaggatattacaatataaccattggtaaaaatacattcaagttagattcattaccatttccacctacttttgtaacttatcttgcaagagcggataataaatatcaatctgaagatgatgtcattagaacttactccgataaagaaactgcagcagttgatgctaacgacataactgtcggatataaaaaaggtgaattcaacattactttaattggacaaaatggtgataaattatcatatgaagatttatccatatctattaatggtgctaatttcacagctaaaaccgatgaaaagggcattgcagttattcctctttcattaacaactggaatttataatatgaccattaaatttgcaggtaatgacaattatgcaccaataaatgtgactaaaactgttacagttaatgatgacagaattaaaaccattttatctgcaactagtaaaaccctttatttaactatcatttctaaaggatattcatacaaagtcacatttaaagatatgaatggaaaagcaattgcaaataaaaaaataagttttaaaattgatggtaaaacctatagtgcaactacttcttcaactggaatagctaatattaaaataaaagctacaactactggaaataaaaaagcaacaattagctttaagggtgatgataaatatgctccagtcactaaaactttaactgtaaaagttataaaacaatcatccaaaatcagcgcttataaaaagacttttaaagtaaaaataaaaactaaaaaatacaccattactttaaaaaacaataaaggtaaagcaatttacaaaggcactgtttatattaaagttaaaggcaaaacttataaagcagttaccaattctaaaggtaaagctacatttaagattaccaaattaactaaaaaaggtaaattcactgcaaccatcaaatattacgggaacaaatattacagttccaccagtaaacaagtattaataagaacaagaaga

SEQ ID NO: 76159 - DNA, 1629 bp, Methanobrevibacter gottschalkii
  source 1..1629: mol_type = genomic DNA
gcaaatgacaatccaaataattctgatgatatttccaattatcaaataagttctgatttatcaaatactgaaattcaaacaatgttggataatgcaaaagaaggagatcaatttgaatttactgacagggaatataagaatatttctttagttgtagataaaaagttgaatattgtctctaaaaagaattcaaatattcatacttcaaataaaatagctgataaagcaagaaatttgggattaaacaattctttcggattttatttcacttctaatagtggtggaagttttttatatgggttaacaattatatctaatagtgattacggtatcgttgttgataaatctgataatacgacaattaaaaatgttgttataaaaaatgggaatgttggtattttggttaaaaactccaataatgcggatataattcagaataatatttcaaaagcaaattccaatagtattcatttagaaaatgtatctaaatcaataatttcaaaaaatacaatttcttataatgggagatctggaatccatgcttcaaatatatactattgtaatgtaactaacaatactgttcatcataataaatttaatggaatttcattgtacaataaaacaactggaaatatcattaaattcaatttagcttatgaaaaccctaatggaatttatataaattcacagtcagattttgatgttgttaattcaaatacattcactaaaaatcgacgtaatactgattatgaattaggtgctttcgaatcaggtaatggactgctatttggtgctgattttaaaacggcaaaagagggaaagtcttcaagattggaagttaaatataatgttttaactcataatgagggataccaggctaaaaacaatccggatcttccaacatttaaacttggggataactggtttgactcaactgatgatgagaatacttttgtttgtccaatgcttcttgcaggtattatgaaaatgggaactatatctgttaaaaacggttttggtcttcagatgtatgatacaaatggtgaagcagtcacagaatttggtacatttgacaccacagttaatgttaatggaaaccaatatacagcaaaatttgtaaatggtaaagcaattattgatgccaatctggatccggataaagaatatgaaattgaagtaattattggggataaaccagttaaatttacttatagaacctcatctggtgataaaaatgatgaatcagattcacaaacatcaacagatggtgacttcggaataaatcatcatgattttattgatgctatgggaaatgatgcttcaaaaggtgttgggaactcagaaaatggaacttcaagtgctcattttgcaaattcagaacaatctggagctcatggaactaatgcttcgggtaattttcaagattcatctgataatggtgatagtgtattaactaatgggaatgctaatgctggagattccagtaaaggtgaacaatctgaagaaggaaaagcatatgaaatagttcctcaaagcaaaatttcaaaagaaatcactgatacttcaggtattattgtattaagtattgtttctattctgggaatgattatttatgggtactggaggaaa

SEQ ID NO: 76160 - DNA, 93 bp, Methanobrevibacter gottschalkii
  source 1..93: mol_type = genomic DNA
caagacattatttataaagaaatatcaccaatttttgaaaagatggttagagagtttgttaatgatcctaatagtaatttaggatttgaaata

SEQ ID NO: 76161 - DNA, 42 bp, Methanobrevibacter gottschalkii
  source 1..42: mol_type = genomic DNA
ggagcatacatgtccgcagatccagtttacaatgggataatg

SEQ ID NO: 76162 - DNA, 450 bp, Methanobrevibacter gottschalkii
  source 1..450: mol_type = genomic DNA
tttattgatagttcaatggatagtattaatagaaccatgcctggtgttagtgattctattgttaacggggataaagagtataatgaagctgttcaattagtcaatgataaaagttttgatgaagcaaagactaaagcagtatctgcagagaataactataataatagtttaattaaattaaatggtatacgaaataatttttcttctgatataaatgaagttcaagaagaatatattggcactgttattaaagaattggaattaaaaattaatgctgtcaataatctaaaagaagctattgactgttttaaaatcaattcaaattacacaggtacgaattatgcttcaaaagctaatgatctaatgtatgaggctacagagtaccagcatgaacgtaattcaatagtaaaaaataattcaaatttattcaaacaacaaaattttgttata

SEQ ID NO: 76163 - DNA, 438 bp, Methanobrevibacter gottschalkii
  source 1..438: mol_type = genomic DNA
ttgaacaataattttaatagtcatgatagtgagattccaaataatacagtttcttctcaggaaagtaactctgcaaatattcaagattccgataatggtggggatgtcaaaactcaggtgacatcatctcagacaactaactctaaatcatgggagccgattggaagttattcaggttcaggttcaggttctaaaacaattacggtacctgaaggtaaaataaaagtggaattttctgcatatcctattaaaaattatgctactaattatttaacagtttccggatctaatggtgagtctggtggagtagattggggttctcatagtgctgttaagactaaatctgattcatttatctatacttccagctcttctgagacatttactattgattattatgaaactgtaagttgggaagttcatttttacaggtatcag

SEQ ID NO: 76164 - DNA, 207 bp, Methanobrevibacter gottschalkii
  source 1..207: mol_type = genomic DNA
gctagtctaataataagtgattcgcctgattcatacaaattgattcccatcaaaaatgattcatttgaaccgaactacattaataaagtcccgactattcttccgaaagttgaaacaaataacactacaaatattactacaaataaaactaattataacatgaccaatttgaattatacaaatcagtgggttgaaacatacgaaaat

SEQ ID NO: 76165 - DNA, 96 bp, Methanobrevibacter gottschalkii
  source 1..96: mol_type = genomic DNA
tttgcatttggatcagatattaatggattaataggttcaccaactaatttcttcttacaaggaattggaattgatgacttaagtggatcaattcca

SEQ ID NO: 76166 - DNA, 42 bp, Methanobrevibacter gottschalkii
  source 1..42: mol_type = genomic DNA
tggggaggaggatggctaatgcagatgggtgcacttgacttt

SEQ ID NO: 76167 - DNA, 54 bp, Methanobrevibacter gottschalkii
  source 1..54: mol_type = genomic DNA
tttgcagtgcctgcagtaaatgaagcagcaggattgattgctggaaacgcaaat

SEQ ID NO: 76168 - DNA, 534 bp, Methanobrevibacter gottschalkii
  source 1..534: mol_type = genomic DNA
ctgtttaataatactgtaaacatctatcttgatggggaaaatgtaagtgttgaaacacaaacttttgaagatatcgattctaacagtttaaacaaagatatctgtagttatacattaaatgttatgaataatacaacatccgatgtggaaactttaaaaaatggagtagaaaagctttgttatcaacatggtcttgaagatgctgaaataaacattgattcaagtttaggacatgatcagatcccaattattgtccatgttgacggaacatcaatgcttccaacattacaaaacggacaaacagttttagtaaataaaactcatgattttgaagttggtgatattgttgttgcagaatctaaggaatatggtggaattattaaaagggttgacaaaattgatgaaaataaagttcatttaataagtgacaacaaaaatatttcatatgagtatattgatggagcactatatcaaatcaaaggtataacaacatgggtagatatttctgatgtcaacggtgtggttattgattat

SEQ ID NO: 76169 - DNA, 3864 bp, Methanobrevibacter gottschalkii
  source 1..3864: mol_type = genomic DNA
agtgatgtaaatgttacagattcttacacaacaagtgtagcggatggcgcatcaaatgtctcagttcctattgaaaattctgatgattcatcagtactttctctatcaagcgaatcagatgttggcaatgtatcatctaagaattctgaatctgtaaaatcaaatactttatcaactaactcggatactaactctttaagtaataggggaaatgatgttttagaagtgaataataccgcttctccaactattaatgcatctgaaactattgcttcaaaagatattactaagtattataaaggaagcacaggttatactgctaaatttttagatatgcatggtaatccattaaacgggtcagatgttaaaattactgttaatggtgttacttatactaaaaaaactaatagtgtaggtgttgcttctttagcgattaatcttaaacccggaacttacaaaatagtttcagaaaatctcattacaggttataaattaaccaatactattaaagtattgtcaaccattaatgcaaatgacgttactaaagtttatactgacggaaagaagttttatgcaacctttttgaaaagtaatggtaaagctttagctaatgcatatatcaagtttaagattaatggaaaaacatactctaagaaaactaatagcaagggtgttgctagtctatcaatgactaaccttaaaaaaggtacttataaaatggtctcttataataaggatggtctaactaaaactaatactgttaaagttgtttctaagactagttcaaagcttaataccaatgcctatactttccttaaaagcgatagtaaaaatattaaagttactttacttaacggtttaggatatgcaccaggttcaggtaaaataatcaagttcaccgtaaatggtaaaacttattctgctaaaaccaacagtaaaggtgtagcttcacttaaattaccttatttaaaagcaggtacttatacagtaaaatacaagttttctggaaatacattttatactgcatctagtgcatctaataaattatatattcttccaagtaaaactgctactttcactgtgaaaagcacaacaacttttggtaaaggtgctaatactcctttcaaggttgctttaacttcaggtagtgttcctttagtaaaaaaaactattactttaactgtaaatggaaagtcatatgataaaactactgatagtaatggaatcgtttcaatacctattgatttacaaaatggcaaatatacagtaacctataaattcaatggtgattctaaagtaaatgctaaaaccggatcttcttcaattatagttaaggaaagaacttccactaaagttacttggaaaagtggaacatctttctatcagggtgctcagtcttataaagttttattgcaggattctaatggtaaagctttagcaagtaaagttgttaaattaactgtaaatggtaagacttattcagcaacaacttcatcaaatggatatgctacatttaatgtaaatttagctcctggaaattactcaatttcactaaaatatcctggagataattcttatgctccaagcaatggaaatgtaaaagtcagtgttgagaaaaaagaaaatacaggatatgggtattgggtttatggtgaagacatgagcaatgttgaccttaaatcattagcttccaaaggaactagcgatttattcttaaactttaaagcaattgagcttcatggtcaatctaaagttgaatcatggattgctagcgctaataagttaggaatgagagttcatatttggatgcaaatattctatgaaggtggaaaatgggtcaatcctgttaaaaatggaaaaccatatgaggcattttttgagaaaaaaataactgaagctcaaggatatgcaaaaatcaaaggtgtggcaggtatacactttgattatttaagatattcaggtaatggtgaaagtgctgctcataaaactcctggtggtgctgcagcaataagtcaattcgttgaggatgctactgaagctattcataatattgattctaatattatcgtttcagctgcattgatgcctgaaactaccagtattttaaaatactatggtcaggattactcggtaattagtaaatacttagatgtagttattccaatgatttataaaggaaattatggtaaaacttcagcttggattactacaactacaaaatggtttgtagataattctaatggtgctcaagtatgggcaggcttacagggatataaatctgatagtaatgttactaaattgtctgcttccacaatcaaaactgatgcacaggctgcattagatggtaaagctccaggtgtaattatatttagatggggtgtaactaactttgtagatttcagttcattatctgacaaatccacatccccaagtactactggatccgtaactattgcagatataattgcagcagcaaataatttgaaaaatgttattaattcaaagaatacaatccctgcaacagttagcgttggtgggtcaagttattcaactgctcagtttttatacatgatgaccgaagctgttaagaagattaatggtggtaaaacttcatcacaaatattgcctatatctgttggagttccaacaaatccatctggttcatttaaatcaggtaatatcgcatccagcgaatatgtgaatatggcaatcagtattaatagtttcattatggaaaatggtagagctccgaatttcgcttcatcatcttcattaggcactattgattatgattctttagttgaaatgtttgctgatattttaacagactataaagataataataaattgccaacttctgtaaaagtggacaatggtacaaaatccgaagtcataactgccaaaacaatatccatcaaggatatcgttactggtgcgactaatttgaaaaaatattataatgattataagaagttgccttccactgttactgcaggtaaaattacattcaaattatctgaatttgtttacttgatgagtaaagctattaatcaaatcggaaaatctaatacaaaggcaattactataatcactggtataggtaatccaacaaatccttctggagataatattaattcaaaatatttatcaaaatcagagtatcttaaagttgcattaaatgtgactaattatataaataaaaataaagtagctcctaattatgtttcatccagtcttggtaaaattatctactctgaatatgtcgatgcattttcacgtatcctggcattttatggtaatgaaaatcgtttaccaaatacagtaactattagttattcatcaggatccggatcaaattctggaactggtgcaactggaactggtttaaatgaagcacttaaaaatggtactgagttgtcacaatatcttaaagctactaaaaattgtcaggtagacaattctaagattaaagatattgttaacaaagtgactaaaggtttaacatctgttaaagataaagctactgcaatttataattatgtaagagacaatttggattatagtttctattacaatactaaatatggtgctgtaggtgctttaaatgctaaaaaaggaaattgtgtcgatcattcacacttgttagtcgccatgtttagaactgctgatattcatgccaggtatgttcacggtaaatgtacattttccagtggaagtacttatggtcacgtatgggttcaggtgttagttgataagaaatggacagttgcagatgcaacaagttcaagaaattctcttggaaaagtagcaaattggaatactaataaattttcatttaataattattattctgaacttggtttc

SEQ ID NO: 76170 - DNA, 1911 bp, Methanobrevibacter gottschalkii
  source 1..1911: mol_type = genomic DNA
tccaatactgttgatacaaatttaactcatgatgcaagtagtgatgctaatatcggaattaatgatattgaatcttattcttctggtgttttttctgatgatgtgaaatcaacaggtaatgttattgttaatcagagaaattataagatgtattttgatgatagcaatgttttaaaaaaggagtatggcggcaaaatcatcgcgtttagtggtaagttcactgataaaggtgttattactattgattccgaaaatactaaaattactggtcgaaatacattgtttaacaatactgtttttaacatcaaatctaatggtgtgatgttgactaatttaaattttgttttaaataaggaatttagtgataatgaaggtgcttgtgtactgattaatggtgacaatgtcactgtctataatgttgatattgattataatgtgcctaaaaatgttaccggatttggaatctattccaatggtttggatgaaagtttatctgatgttaaactggtcaacaatactgttcggcttcatggtaatgctttaaatgatgggtataattatggggtggtattgactaatactcgtgatgctattgtttatggtaatattattgattgtcagcttcctttgagggctgttaattggatggctgaaatatatggaggtataagtatggatgcagtatccgggctggctgcgggctcatgtaatggcttaagactttccaataactacatcagatgtgttgtcaatggtgttgctcagggcgaacctacattggatgctgtactgatttatgcatgtcacaattcgacaatagaaaacaatacaattattgaaaatgattatgttacaaaaaagggtgatgttaattatttgtatggtttggatttgtatttgtctaatgatgttgtaatctatggtaatgacattcatattcgcacaagcggaggtaaagaggctcacggtactgcttatccgattcaagtaactggacaggcagaaaatatcctgattgcatttaacaatttgagcagttacagtaacggacctaatataggtatttattcacaaaactattatggagtaactcatctggatattattagcaattttattaatgttacaggtcatgcaagcaaacacagttgggctttggttgctggaattgaagtgcaggattccgatgacagaataatgaacaataccattattgttgatactgtgaataaatttgaaaaaggatacaacgtttacggcataagctattcacaacgaaccgatggagatcacaattataatattcagtataataatgtctcaaccaatagtgaccatgctgttgcactgaaaggcagtggcagttccactgtcagtaattccattgttgccaataatattttaaagggcagaaaatatggtggaaaccgtgcagcatacattactggaggaacaggtaatgttattattaataatactgatgggtcccgtcctgttcataaaatgactgatgatgagtattccgataatttgaaattttatctttcaagtccttttaaaggaaacggtctgggattgggttggcttgacggtgatggaaactccataatcggcaatggtgacagaaatggcaattcattaaataatggaaatagcggtttggttaacaataaggtttatggtaataatcttaattatagtgaatcgcaagcacgtaatggtgttttaaattcaacatattacacttatggttcttcaggtactgatattgccagtgcttcttcatcttctggttcaggtgctggaagcagtaactctgagtcatctgatgtgaaatcctatgaagtaactaaaaaaattaatgataatttaattcatattcctattgttattatggctgttattgcatta

SEQ ID NO: 76171 - DNA, 3225 bp, Methanobrevibacter gottschalkii
  source 1..3225: mol_type = genomic DNA
actgaagatgtcaatgatacagcaattgctgattcagaaattgatgaagtaagtgctgtagatattgaacaatctgttgacgataatgagataacagaaattcaaagcagtgatgaatcaaataaggttcttgcaaggggaacacctactactgcgaaggattggaatacattaagaacaaaatgtgaaaaaacaactgatcaatatataacattgactggtactagttatccaattggaacttatataacttttaaaaatagtgctacaattgttggtagtgatgttagttacattactggaggttctacttcaaatactccttttgtaaataataattctgctttaacactacattttattaatgtgaaatttttaaatgttaatgctaagaatttgttagagcttgatggtactgtttatttggataattgtacttttgataatgttcaaactgcaaccggacacaattctgtaatttataatactaataatttgatgtatttgactggttgtaatattactaattgtcatactggttatggtgctgttagtaattataactctggaagtacaacaagtcctgtaatgtatgttgatgattgtaggtttattaataatagtgctagtgtagaaccgggtgctattaataattgtggaattttatatgtaaataactctgaatttgatggtaaccatgcaaactggtgggctggagcaattcatactcatacaaatgctcaaacagaaattgaaaatactaattttagaagaaacactgctggatggaatggtggtgcattattcacctacagcaaacttaaaataaaaaattgtacttttgaagacaacaactgtaccactaacaatggtggtggagcaatcggagcatacaactatggatcaggatacaatataacaatagattcatctagatttaattataatacaaacctttgctatgcatacacaaatatttcaactacttcagttggtcgtggaggagcaatctctgtacttaatggaggttatttaactgtttataattcaaatttcactggaaactatgcaaaaataggtcaggcaattgcagctgcaacctataattatgaaaatggaactggtggaaacccacacattaaaatatgcaacaataaatttacagaccacactgcaactggaattgatactgtagttattactggaaatgattatatattcaacaacaatgtatttataaatagttatcaaaacaccatttatacaggaactggaaacacatacaattctgcagctttgccgggtaatctgaattccaaattgaatttaaaaacaaaattaagagcaactaatactgaaattttatctgattatcaggatcatgatgttgtttatgttaatgtttcttcagataaagatgcagaagatgacaatgttcatggtcaaagttgggatgatgcttatggtggtttggagtgttttgtaatggcaataaattatcttcataataatgggataatttatattgcagatgggcgttataatgaggactatggctatgaatactcaatagctcatggaaactttactatgattggtcaaggtccaaaaactaatatagagaagattataacaactgtatatggaggtagtgatcaaaattctactcataattttatcaatttatctttcactggtaaagattttggtataaatgctaatttcattaattgtacatttttaggttcaatttcaatttcaaaaggtctcacatatcatgatcctaatcatgttgtggaatatggttatgctcaaacttatttcatgaactttaataactgtgttttcaaggatgtcaatactactaatgctttagttactctttataagtatggtgctgtgaactttactaattgtatttttgaaaatattactgctgattcaattgtttatcgtaatgatattaattattttgaagaggatggaatttcatttaaaaactgcactttcactaactgtaaatataatggtattgctgattccttagctaattttgatgatgctgttgttattgaggattgtacttatgatagtgaagttgctttaggaacaactgaagttaatggtcattattatataaatgctactaaacttaaagttactgctgttggcacaagtatttcaattaaatctaatgaaaataatgtaattgttaatttaactgatgttaacggtaatcctgttgctaatgcaggtataatttatagtattgccggaaccaatgccagtgcaactactggcgctgacggtactttcactctttctaatttaaaaggtattgtaaacatcactgtttactattcaggcaatgaatcttatttagcttctaataaatctgataatttcatatttaaatacaatactgctgtttccagtgcggttaatggtgatgatattctaatcattttaaaagatgatgagaacaatccaattgcaaacgctaatgtaatttatacagtcaacggcattgactacaatgcaaccacagatgaaaatggaacagtaactgtttccaatttaaaaggtaaatttgcattcaacgtattatataaaggagacacactacacacagcttccaatgcttcaaacacattcatcttcaaatatggtacaaaaattacagcaaaaaaagtaacagccacttacaatgttgctaaaaacttagttatcacattaaaagatgaaaacggaattgctattgcaggtaaaaaagtaaccgttaaagtcggatctatccgcaagactttaactactaatgctaaaggtcaggctactttaaaagtcagcaatcttttgcctaaaacatactctgcaaccgtaacttatgctggtgatgatacacacattaaatcctcagttaaagttaaggttgttgttaaaaaagcaacacttaaagtatctgctaaggctaaaaaattcaaaaaatcattaaaaaccaagaaatattctattgttttgaaaaataatgtgggcaaagtcctgaaaaagactaaagttacattaaaaataaaaggaaaaacattcaaagcatacaccaacagcaaaggcattgccacatttaaaattaccaagttaactaaaaaaggtaaatacaatgcttacattaagtttgctggaagcaaatactacaacagcttaaacaaaaaagtcaaaataaccttaaaa

SEQ ID NO: 76172 - DNA, 1041 bp, Methanobrevibacter gottschalkii
  source 1..1041: mol_type = genomic DNA
tctactgttaattatccaaggagccataaaacaattgaaattacacaggataattatgaaaattattttaatattagaacaggaaagattattgatgcctcatgtatttctaagggagatactttaaaaattggcaatatttcaaatagggcttttgttatagatcgtcaacttatattaatgccaatctcttctaatgataagattagtaatggttttatccatcttattaaaggaagtgatggttctactgtaacaaatcttactattaataatacaaaagatagattaaatattttaggtggaaatgtaggtcaattacatggtatttggttatcaaattctaataataatcttatttcatataatacaataaggattgcaaatgctgcaggcgtttatgccatgcctatgggttggtcaagcaataatagaattatttacaataatatgaaaacatatatcacatgtaatatggttatgggacaatgtcattataatttaatttcacataatagtttagaattgttaagttattccgatacatctgttacaaatttaatttattttaatccttttgggcatgccgattatagtggttctggattatgtaaatataatatgatttcattcaatgattttaaaggtttttctaatgggcctatgtccattttattacaaagtgtttatgaaaatcatgatggcactgttattgcaaataacactttttctaaaggctcatatgctattcatttatttggtaacaatatttctgtttatggtaatgtagtactcaatagtggtattggtatttctgtttttggacgtaatttttctgttcataataatgctgtaattggtgacagtcaaggttatggtattatggcagaagcgaatggtggttcgctgtgtaatgtttataataataatattacttttatagatgtttataatgcaatatttattggtaatcatgtcaaagcttataataattatataaatatcaaagaatatggggtgagtatatttattaaaggtaac

SEQ ID NO: 76173 - DNA, 144 bp, Methanobrevibacter gottschalkii
  source 1..144: mol_type = genomic DNA
aatattcatgataataggattaataacaaacatgatgctggtatatcagtattaggtaataataacactataaataacaatattattaataccaaaaatataggtattacactacctgctagatctactaactgccgttattat

SEQ ID NO: 76174 - DNA, 1182 bp, Methanobrevibacter gottschalkii
  source 1..1182: mol_type = genomic DNA
aatacatttaccaataataaaattaatagtgaaagttatggtatttatattgatggtttagtttataattgtataatattggataatattattgaaactaatagtactatgggcatttttaaagacataactgatgaattatccaatattgaagaaaataacatggttaatggtgttattttagattcaacatatattattgtcaataatactaactatcataaatattttgataaatatgggcatttaacatttaaattcgaaaaaaataaaactaaaataatatttttaacatttttaacaaataaaaatttaatttttcaggaaaaaataaatgtaattagtaataaaatgaacaatttactaattaatgttacaattacttttgaaaccaatgccagtggttcattaatacgtgattttaattttattaatcatgataaagaagctattattctaaatggtgttaatgatgttacagtcactaggaataatattacaaatttatttagaaatggcagtttatctaattcagctgtattgattcaagatgtttgtgaaaatcttataatatcctataataatatatatgtaaattcaagaacacattgttatacttatgcaatcaatgctccttcaattaatccagctactcataaaatgaataacaaattatctaaaagagttaatattttagataatacaataatcatgatttcttcaggtattacagaagctatttacactgatactctatctgaaagtaattttatttctaataaaattaatattatttctaaaaattatggatatggtattgcagtttctaatatgattggaaggttatctgatattaatgtttcaaataatgaaattgttatccatagtgagcaaatggcatatttaatcgaacttctccaagtggataattcaacaattgaaaataataagttatatggtaaaagtaatggagtctatgctattggtatatattggtctgataatatttctgttaataataatgccatttctgtatttggtggaaatttatctaaaattttagaaatatctgatgtattaggtatcggaaattcagctatagcaatacttaggaattcatctaaaattattatttccgaaaatattatttatgctaatctttcaaaaacaatatttgacaat

SEQ ID NO: 76175 - DNA, 2775 bp, Methanobrevibacter gottschalkii
  source 1..2775: mol_type = genomic DNA
actgatgggattataaatgcatcttttaattcatttattattgataatgagaactataactgttattttaatgaggttggagaattatattctaatgttgtaataaaaaatagtactttgctaattcataatttaacaaaaaatcaattattgattataaatgatctagttaaaatctcatcttatgatttaaattcaccctcttcaatttcaataatttttaaaaataatgcatcaaattcaattatttccaatgcatcttttattaattcttcaattgatttaatcaatgtttcaaatattaatattataaataacacttttaactcttcaaatagttgtatattaaatattaatggtggagaaaaaaatttatttgttaataatgagctatttattaattctactgatatttcagtgattaatctcaataaaactttattaaatattataaaaaataataatattaaattcaatacatctaattctaaaattataactattaataattctaatttcacattgattagtaataatgtaataataggcatatccgattcattaatttttatttgttctaagggttcaagttatgataatatttataaaaatatattaaatgctaatgcttcgtcaatatgcggatatttagcttctaatgcaaaatggagtagtattagttataataatattttaattaataaatcaaccaatcagtcagctatatattattgtaataactcatctaataatacaattaatgaaaactatattatttcatattcactaaatgctaatgactatgcagtttcagtaatttcaaatgaaagtttatcaaatttaataattaaaaactatttaataagttctaatggatttaaacgagctaattttgcagtatacgctccatttgatttggttaaagataattctccatttgacatttatgtttcatgtaatggaagtgatgttgtaggagatggtagtattgataatccttatgctacaatcaaaaaagctattgaaaatagtttaaatttgtatgttatacatgtatttgatggaaattatactgagtctaatattattattgataagaatttaacacttgttgctgttaatttaggtaaagttttcattgatgttcaaattaatcaattatttgatatacttgaagataatactttatcaatttctggctttttaattggaaatgctcataatgttgatggaggatccgtatttattaacaatggtaagttgttcattaataatgtagttatatttaattcctcatcttattttgataattctcatccaatatttgaccaaaatataacttatcatgaagataatttaattgataaagcacatacagttgattgttctaatacaggtaaaggcggagcaattctcaataacggtgaattaattattaattcatctatcttttttaataattttgggcatcgtggtggtgtaatagctgattatggcaaaactattataaattcatctattttttataataatcggggaattcatggaggatgtatttattcagattcaaaaaataatttgtttgtaattaactctatttttaataataacacagcagtaacttcaatagacttttgtaaaatcatgttacattccattggttggtcaattggagagaattatatttataattataaatctgaatgtgattcaccaattggtgctggtggagtaatttatactaaaaatacttcagtattaattaaaaattcatcttttatttataattctgctcgtattggtggtgtaatagccacacaatgtgatatttttacacaactatcaaattttatttctgatgttaatttatatattgataattgttattttaatagtaataaggctaatgatactagatttaaagatgatccactttatttaaagaactatgattattttaacgattataatggaggagttgtttatggaacatacaataaactatatataaatgcttctaatttttattataatcaggttattaataatggaggagttttatatgctaaagctaatgatggtaagataatagactctattttcaataataatcgtgcaggaagtaatggtggtgctttagatatttcaaaaaatttccttatcatgagatcaattatttcaaataattcagctagatatggtggagctattgaatatgattcttatacctattatgggcatattcaagacaactttaacatttataattccaccatatctaataataaagctttaaatgctggtggtgcatttaacataggttctggaaatgtttctgttcatgattcaaatattgtaaataattttgcaccttctggtactacaataaattctcatggaatcaaatacgctattgatatgagatataactattggggtgtattgccaaatggtcatattggacctgatgactcagtttggaatgtgaatcataatttatttaaaccatggtacaaacaatgggtagaatggaagccaaaagtcattgaatcaaataattctggttttaactctaattctagtaatcataatccttatatcaatcctaattccaactctggtggaaataatcataataatccaatatctacaggatctagttcttccactacaacttcaattggtggagctaatgggaataatcatggatacggtaatgggaaatactttggttcaggtgatggaaataatttgggtccgagtagtggaaatgga

SEQ ID NO: 76176 - DNA, 291 bp, Methanobrevibacter gottschalkii
  source 1..291: mol_type = genomic DNA
gctattccaggttataataaatataatgggcaaaatgtgaattcaaatacctcatcaaattcacataagtctcaaaatcgtggaaatgttgattcagatagcctcagtaaatcaaatagttcaaaatataatcctgatttagtttctgctggttttactgttaatgctgcttcatctccatcaagttctcaaagaggaatagaacgtgctagtaaggaatcaggttctttaagtgattcagcatcttatgaaattactaaaaaaattaaagaagtcttttatgatgagaac

SEQ ID NO: 76177 - DNA, 6501 bp, Methanobrevibacter gottschalkii
  source 1..6501: mol_type = genomic DNA
gatactaatacgagcattgtagaagaaccaatggatgttaaacataatttatgtgatattaataattctttagaaaatcaagaaatttatgtcagtccattaggtgatgatgatgctaatggaagttttcaaaatcctgtttcctccattcatcatgctgttgcaatggcaaaaaataattctaaagttattttaatggagggggaatataaaggtgcaaataatacatttattttaattaataaaaatttaacaattgaatctttttcaaataatgttgttattaatggagagaataaacatgcattttttaaaataaccccctcttcttctttaatacttaataatattaaatttattaatggatatacagattcttattctcaattaggtattattaataatcttggaacattagtgataaacaattcttcatttaataatatgaactctattatgggaacattttttaatgaaggaactttaaaaattgaaaataccaaggttactaatgcagtttctttaacaatggctcaaatattaactaatattgggaatactactatattaaattcccaattaattgaaaacaatgaatattcttcaattgatgttgttgtttataattataataggattagtattgttaattctcaagttaataatttattttcaaataagaaatattctgaagattcatataatttagcttcaattcttattaataattctaagttagataacattgatcttgaagatgcatttgtttgtattcacaactctcaaatcacatttaaatctatttttaatggttgtaatgtttctgttgatgagagtacatttctttataataagtctcttttttcaataattaatgtaatgaattcaaattttacagcgattcattcagtttttaattctcctatttcaactaaacgttcgcatgttaatataacatattctgcaattttaagatcaatatctggaaatgcctataaatgttatctttatgctccttataattggtggggtattaattcaggtccatcttatcaatactttacagatgttaatgttagttattgggcaatatctactttcgaatatgaatctgactatattccaattaatcctaattccacttttacaacaacattaaataaatggagtgatgggaattctacatttgaatttaaaacagaagaatatttaccgtttagacatttgaaatttgaatctcaaaatggtaaatttttatattcatctgcaaatatcgaaaaagttttttcaaattatttaattggaaacaatcttgattgtcaagttcatgttattatagactttcaaaggttgactcttagaattggagaaggtttaactaactataattattttgtctcaacagaagggcatgacggtttaggaaatggtactttcgaacatccatttaagacaataaattatgctgtttccaaagtaggaaatggaaacactatttgtttattagaagggatttataaaggcaattggaattctaatgttacaattacgaagaatataactattgttggattaggaaatgtaaatttactaagatctaatgattatagtatcttcaatattaaagaatggggaagtttgtctttaaaaaacattaatttctctgttgatataattgattatgcacatccattaattattttaaatggtgggaatttatctattatcaattgttctttttcaaatataacttctacaaatgttatccacacatctaatgggatagaacataatggaattgttaatatatctgattcttattttgcagatatttcaggctcaatattaatagggtctgctaaagtaagtgtttcaaattctttatttgaaaaaattaaatgctataggataattcaaggatatgaatattataatgtactatttgcaatttcatcttccatagaaatttatagttcctgttttcaaaataatttaatgggtattgtaaatttacatccatttttttattcatcatcaaaacttagatattctcaatatagtaatgcatattcaagatatgcttatattaaaaacacaaaatttgaaaataatgtatttttcgataagaattcttattattcaagtaatggaattggattggatatttataatgaaaatgaacatttttatggaattatagataactgttcattcattaataataaaggtcaattagccatcgccaccagtgttaattcatcaatatttatgaataattttgaatcccgttatggttatagtatggtttatgctgatttaattaataattcagtttttattaataataaaaatctgtatgaagattataataatgtatttatcggtaatggcatagctagtgctggatgtatattggagtctatttttatgtataatgaagctgcttttggtggagctattgcagatacaaaagaagcccattattgtgtttttgtaaataacacttctaaatatggtggtaacgatatttattcttattcaggagatgtagattattctagtaattggtggggtgataatcaaaaaccaaactctgataaagtttttattttccttggaactttaactttgaataattgggtcataatgacatttgagtctgtttcaaattctattattaaagcttcattaaatgctcttaataatggggaaggtaatatttgtaaaattaaccacaacatgccttctcgcatggtttatttcaaaattaatcatggaagtctttctccagagaatactttacttataaataattctgcttatacaaacatgacttataatttaaatttagattttaaagtctatgcaagaattgataatcaactattagagttagatattagaaatacaaaaactctcttaataatggaagatgttatttttaaaggtaaaagtaataattttgctgttgatttaatcaatattaatggttataaaatatttaatcaaacattagttgttgaaattattgatgagaataatacacagaatatatttacaattcaaactgatgataatggtcatgcagaatttaatgtagattatccagttggtatttatcaggtaaatattaattatttaggtaatggatattttgataaatgcaattctacttctataatgaaaataataaaatctaatacttatttaattagttataatcaaacatattacggcaaaaataacttgtttaaatctgtattatttggtgaaggaaataagaaattaagcaacatgactataaaattcacgattatagattctaaaggtaatttaagggaaatctattctttaacaaatcaagacgccactagtgaaattattatcaatttggatgtaggtgagtatacaataaggtctgaatttttaggtgatttatggtattcttattcaagcagtatttctcatatattggtcaatcctgttagttccacactaattgtttctaatgttacattatatggtgtgggtgatgtttataatattactttaaaagatattcatggatcattgatacgtggtgaaaatattattgtcacaataactcaaggagcatcatgtgataaatttacattaaaaacagataataatggtgttgcaaaattaactataaactatttacctggagtttataatgttaaagctcagtttttaggagatagtatatatgcccctactagtggtgagggagttattaaagttgaaaaaatttttactataatttcagggttccatcattgtattttaccattaaatgggatatacacagttgttttaagtgatatgtatgggcgacgtgtcaataatgaatctgtaacattatccttatataaaggcaatctaataaagaaatacacaattaatactgatgctaatggagaagctgattttgttataaaccttgaagaaggaacttatctaacaacttttgaatatggtggaaataaatggtattgtgatgcaactaatgctgcaactattgttattagtaaaaaagttaatttatccaacattaatataaattcaacagatttggttcagtattatggggaaaataaatatttcataataaaatttaatgatcctaatgcatatagccaatatggcaaaaaaattggagttacaatatcttctggctcatggtcacaatcttatgaagttttcactgatatttttggtcttgcacgtttaaaaatcaatttgaatcctggagaatataatattacttacaaatattcaaatagtcattataatatatttggcacatcttcaaatactatacatgtttataaaatgcctgctgttttaatagcgaataatattgtgatgaaaagtaatgaacaacaattatatgaaataaatctcagagatattaataataatcctatcaaaaacatgcttgtaaatattgatattgatggtgtgaaatataattccactacaaatgatgagggtatagctaaaatattacttagtttgggtgttggaaagcatattattagttataattttatcaatccaaattatttgtcctcaaactcatcatctgttattctagttgttgatagtgataaaataccttcaaatttatattcacaagatattaatgcatttgataatcaaatattaaatttcactatacgattgtcagacatgttaaataatagcatatcaagttctgaagtaatacttgagctttttacattttatggagagtcaattattaatattactggtatcacagattccaacggaagaattagctttgatttaaatttagattatggaaaatatatagctaatttacattataatggaaatgctttgtatttagctagctattcaactaatacgattaatattgaatcagctgataatcgtacaaaaaccattttatttaatgtagagacaaaattaactaattctaaatattatgttattttgtccgatattaatggaactttgcttgttaataaagaaattaaatttatcattggaaataaaacaattacttccataactgatgaaaaaggaagagcttacttggaattaaacctaaatcctaattattatattataaaagctatttttaatggggataaggattacaaatcagtttctagtttgaaaaagatatttatttcaggtgaactaacgcatttatatgctataccattagttaaatattataggaatggaactcaatttcatgcaagacttgtgaattctaaaggagttcctttaattaataaaatattatctattttattggaagggaattattataattgtacaactgatgaaaatggatggattacattaaatattgacttaaaaccaggattttatgatgtggaatgttactattattcaaataatactgatgaaaattcttttgataaaaccaatatcacagtattatctactgttttaggtcaaagtgaagtgaaatattatggagattatccttatttaacaattaaatttttagatggtgcgggaaatctaattaaaaacacaagttttgttattgatattgatggtaagaaatactctgcacaaactaatgatgagggtatttttaattttaatcttaatttaaattcaggaagtcatcttatttcagttaacaatccttatgatgggttatttgtgacgtataaattagatattttaacaactatttgctcaaataatctagttaaagtttttaacaatggagtttcatatactgcgcaattacttgatagctttggaaatccattaaaaaataaaaacgtaaaaataattattaatggtgttttatattataaaaaaacagatgttaagggtattttagaattaaatatggattttaatcctaaaatttatcttgtgacagtttttaatccagttactaaagaatatattgaaaatacagttaaaatattgccaacacttattaataacaagaatataaatatgtatttctcgaattgtgctttttataaagttcgtgccattggaagtgatggtaaaattgttgaatcgggggtaattgttaaaattaaagttaatggaaaatcttacaaaattaaaacaaataaagatggttatgctttgtttaaaataaacttaaaacctggaaaatatataattactgcagaatacaattcatacattgtatcaaataaaattaatgtaaaatcattactaacagctaaaaacatttttcataaaaaagctaaaaagattaaattttcatctaaattagttgatattaaaggaaaagcattaaaaggtaaaaaaataacttttaaatttaaaggaaaagtctataaagttaaaactaataaaaatggaatagccacacttacgattaagaatttaaaagttggaaaatatactataatgtcaatatggaataaattcaggataaaaaacactattaaaattaaaaaa

SEQ ID NO: 76178 - DNA, 5631 bp, Methanobrevibacter gottschalkii
  source 1..5631: mol_type = genomic DNA
actgaagagtatctttcttcggaaaattatgaggaaatacttagtgcagactcttttaatgataataatattcttgcttcagcaagttataataaaacaatttatgtaaattacactggagatgactcaggatcaggcagtcaaaacagcccatatgctacattaaataaagccatatctaatgtaaatgattctgataatgcagttgtatatttaagtgctggaagatttagtggtgaaaataatacggatttaagtattaatttagctcataggaattataacagtagtttaactattattggagcaggtaatggtcaaactatactcgatggaaatgatgaatcagccattttcacatcaattagtgctgattctattgtaactttaataaatattacatttacacatggaaaatctgaaattggttcagttatgactacttctggaaatttaaccatagataattgtatttttgataataattatgctactagttctgcagcaatttatgcagaaaatacagaagatataaaaattacaaattcagtatttaaaaataattatggacatgaaggatgtgcagatttttattgtgaaggcagtgaatcaacaataatagatattatcaattctacatttataaattcaacaacaccatatttatatagtttaccctcttttttaatccaatattcaaatgcaaatattattggaaataaatttgaaaatataactggagtatatcattctggaacatttgaattaaaatatggatatggtaaacgtaaagtaattaataatacatttattaattgtaattatactggaaataacgatggaggcataatttatatttcaaatacctatcttaaaaataatcaatttataaactgtacttcaaaaaaagctttaatctattctttaactgaatttaatgcatatctcaaatttaaaaatgcgacaattaatggaactgaatttaaattatattgtgaagtaacagatgatttaaacaatagtgtaagtacttatggagaagttcatttctttattaatgatgaaaaaataaagtccagcagatccaataatggtactgcttcaatatctgtgattaaattattagataatggtgattacacacttagtggaacttattactattatgaaaatccatttgaagttaatgtgaaaaatgcaacactccatgttgattttaatcatgaccccctagaattatgggtatcaaatgatggtaatgatacaactggtaatggaagtgaaaataatccatttaaaacacttaaacatgcattaaattatggatttgaaaatacaatagatttaactattcacatgaaagatggagtttatactggaagtgacaataaagatttatcttactctaatgttggtaaattaactatttttggtgaatcttatagaaataccataattgatgcagaaaacacaaaaaagatttttaattttggtgaatatctaaatgtgacattagcaaacctgaccctaagaaatacaagtggaaatgtcatttctgcttatattctaaaaatctatgattctgttattgaacatgctgattctttaaatggagaatatagtgatacatctaaaataatttttaataatctaacttacactaacagtggtggaatatacatatacaatgcagaaatttacaattccaaatttaaaaattgtaacaatactaaaaataattgccttttacggataggttctcttggaaataatataatacatattgaaaacactactataatcaacaataccgttaacggacgacatggttcttctattgttagtatctctggaaatagtgtattaataaataacgattacattaataatactgttattagtgaaaattcgaagtatatttttcaaagttattctaataaattaatatctgtaaacgaaactttcataggaaacaatgtgtccagttatatagcatattatgatattaatggaaataacgttgaaataataattgaaaatattacttttaaaaataattatgtaaaaaccgatggatccgggttagctattaagaccggaagaattaaaggtgcaaaatttattaataatactgctttaaataatggcggagctattattatcttacctcattataccggcagtcaagttccgaaatgcattcttgaaaatgtattttttgaaaataatagtgcaaataatggtaaagacatatttattgaaaaggccaatatcggttatgaaaacggacaattagacaacattacagtaacttttaatagcttaattacacataatttacaagatattgtgattgcaaatattagtcatgttagtggagctgttattggtggtggaatgattgaatttgatttaaatggctcatatatgggagttgcagaagttattaatggtgtagctaaattaaattatttaggatttacaaaaaacggcaattatactttaagtggttcatataactatgaatcaaacaccaccatttataatagtgctgttgttaatgtaattcttaatccattaaaagaaaatattacttcatatgtttctgatagtagaggagatgatgaaaatggaaatggttcatatgaaaatccttacaaaaccattgaaaatgcattaaacgaaggttataaacaatctaaagtaatttttatcaaagtattggaaggtaactataccggtaaattcaataataatattacaatttatgattctttaaatatcacaattattggtgaaggaattgataaaacaatcatcacaggaaataatactaaaaacaactggtttataaccgtattacatgcaggtaatggatttttaaaattaataaatatgaccattagtgaaattaattataattataaaaacatgaatagtcaaaaatctgcggttgttattgaaaaaggtgctaatgtatttattgatagtgttaaatttactaaaaatcgtggatacaacggcggtgcaatcaataatcaaggtacattaaacattattaactctattttttataataatggtgattcaagttatggtggatctatatataacaaaggtataacaatcattgacaattcatcatttattgcaaatcatgctaaatattgttctgatatgtttaatgagggtattttaaatatttacaattcaaatattcaagattctatgcgtaccaatggttggacaggaaacacccttgtaattggaggccttggcaatataagcattattaattccaaaatatttaggacaggtaaaatgcctttagaactcattgatccagacgatacatatgctgataatccagcatttactataagtattggaacaattggaagtataacattaataaatacaacaatagatggtcatgatgccaaatatactggacctaatttttatattacaaataatgctgctataagttggtctgtctctacaaatattaaaattcacaattccagtttcttaaatttaaataacattctaaataatcaaatgggaaatttaataataaagtcatcatttattaaaaatgtatccaacctgattatgtcaacaagcaattataatctaactgtaataaactcttactttgcagatggaacaatatccactgaaaaatacgatatatccaatatttacttaaataataattggtggggaagtaattctaaacctacttataaagtagataatgttgatacaactcctgaaacctggttaatactaacattaaatcaaagtaataaagaaagtttattaaaagacattattttatcttttaaagttactgatggtgaaaacataacagattatacaggatatttatatcctagaccatttacaatgtctgctataaacgctacattagaatatgccaatggaaatattattaatcatcttatcaatcaaatcaatatggcgaaaaatgcaactagttattatatagaagctaaaatagataaccaaacagttaatttaacaagtaatataacccataatgttactatcattgctaatgatatagaatttgattatggaactaaaacaattactgtgaatgttttattcgacaacttatctgcagatgatgaaattattactttaaaagttaataataaagagtattctactaaaatcaataatggtatagctatctttaatattgacacattagttcgtggaacatatacattaaactacagtataaatgctactgaattacatgacaatgtaataaattcatccacactaattgtaaacggaatagatccaaatattaatgcaagttctaaagcagtgctggttggaaataatgtgacagtaacaataacaataccttctgacttaacaggaacaataaatgttatcttaaataataaaacatatgtggcagaaatacatgataataaagctattgcaatcattcctaatttagcacaaggaaattacttagcaaatgttatctattctggagacgaaaaatacttagctaaaaatacaacattaaacattaaagtacttgaaattaatatttcagcaccgaatgttgaaaaatactacaaaggttctgaaaaactacgagttatcgtaatagatagtgaaggaaatgcaattgttggtcaaagtgttcaaattaaacttaataatgtaaattacacagaaatcaccaaccaggaagggattgtaagtgtaaatcttgacttaaatgttggaaaatattctgcaacaattttagttaatgataaaaaaattaacacagaaataactatcaaatccacaatccaaggatttaatatgatcagaggatataatagtggattagattatcaagcaactttattaaatgatgatggaacaccattagacaatacacttgtaaaactcaaaatcggaaatagtatatatgaagttagaagtaatgcaaatggagttgttaaattaaacaaaaaattagcaattggaacatacactgtattaattacaaatccatctaattttgaaacacaaacagctactttaaagattgtttctagaataaataataataaaaacataattggtgattatttatctggatttagctataaagttcgcatcattggtgataatggtaaatccgtaggagctagagaaattgttaaatttaaaattaacaaaaaaacttacaatatcaaaacagataaaaacggttatgcaagtttaaaaataacattaactccaaaaacatatcaaattactgcaacatacaaaggtcaaagtgttaagaacaaaataaccgttaaacaaatacttaaaacagcgaaaaaaattaatatcagaaaatctgcaaaaaaattaactttaaaagcaacattaaaaaaatccaacaaaaaaccacttaaaaacaaaaaaataacattcaaatttaaaggtaaaacctacaccactaaaacaaacaataaaggaatagctaaaattatcattaaaaagaatgttattaaaaaactcaaggcaggtaaaaaatatacagtaaaagtgacctatgtaaaagacataatcacaggatccgtaaaagttaaaaga

SEQ ID NO: 76179 - DNA, 4974 bp, Methanobrevibacter gottschalkii
  source 1..4974: mol_type = genomic DNA
atcaatgaaagtgaagttgttggaaatgcagaaattgaaaataatttaagcagtactaatgataattttgaagtttcaaaagatataggttataacgtctctaaaaagatttcaacggataattcaaatgaaaatttaagaaattctcaacacatgactttatttataattagtgataatccgggaacaaatattctggataaagctattttagaactttccaatgaaaataagataaatggtgtaaatttaattattagaaatggaaatcaagtaaaatcaatgaatgaaaatgaattaagttatttattatctgattgtgatgcttttataggtgaatggattagtagtgatgtcgattctgtattgacaagtgttttagtaaaaaatcctgatttgtctaataaaaaattatttcttgtattggaacctccttcaggcaatttaaactcggggtccagttcattgaatctaattaggaataataccttgaattataataagatatttacaaattattccaatgaagagttaattaattattttaagaatactaaaaggggcaactcatattctaacattaataattatttaacaaatggaaacggaaaaaatttcgattcaatttttaatcgattagttctttataaggatttgaatgataaaaataatttgaaaaatcaaatattgtttattttaaattatttgggcgttgatgttagttatgaacagccaacatttaccggtgttaaaaactatggtatttatagggatagatggtactccttggatgagtatatttctactttttttaaagcaactaataataggacggttgggattttagaaagtaaaatgtatattgaatctcagcagttaaacacttgctattcaattataaactcattggaatcaagaaattataatgtaattcctgtctttgctgatggaggatctgctgaacaattgaaggtcatggttgaatcctggacaagtgcgggagatgatatttcaggatttttatctaattcttctaattttgatgtttatattgatgcgattgtatcgatggtggcatatggtgttggtggggaaaacttcacaaaagcaacatctttttttgaagaagctggtgttcaggtatttagggcggttcactcggatcatgtttcaaatgaacagtgggaattaggttctactggtttaactacagaaaaaagtgataaatggtggcacattactattgctgaagcgcaaggaataattgatgccacattcattggaggtaattcaagttatatatcaaatttaaccggagctcaaattaccacttatattccgcatgaagggaacatagggttacttgctgacagaatcgattcttgggtggatttaaaatacaccttaaatgaggataaactgatatctataatttattataactatccaccgggaaaacaaaacatcggttccagttatttagatacaataaaaagcatttataatatactttatactttaaaagctgcaggatacactgttggaagtttgccagttgatgttagtgaacttgaatatctaatgcttacatgcggtataaatgtagctacatgggcaccgggagaacttgaaaaaatagctaatagatcttgcataactttacttccggtaagtgaatataactcctggtttaattcattagatgaaattgtaagaatacaagtttctaacggtactgttgcatatattggtgagttaactaaaagagccgttgaattagattataccaaaacaattggaagcacaattgacgactggtataatcaagttgtttccttacttccagatgaaaaatcagttgaagcaaaagaagttttaagtaatattgtcagggctttaaaagattatgctaatactcattcacaagactattatagattatatttaaaatattttgatgaatttaaggaattaaacattcaaggattaaatggatggggtgaaactccaggaaatgtcatggtagttaataaaaatggtacagattactttgtaattcccggattgacatttggaaatatattcgtggctccggaacctcaaagaggatgggagtctgatattaaaaatctttaccattgtactgctgttgctccaacacatcagtatttggctgcatattattatatgcaaactagaaatccaaatgccatgattttcactggaaggcatgcaacacatgaatggttgccaggcaaagaaattcttttatctgcaactgattatggatcagttgttgttggtgatgtacctcaattatatttttacattagtgatggcttaggtgaagctattcaagctaaacgaagaggatttgcagttattatctctcacttaacttctccaatgtcctatactcatttgtatggtaatttaacttttcttgctaatctgataaatgattatcaaaaagcagggagcagttcagaaaaaaataaaattggagaaaaaatacaagatttgataattagcaatgattattcaaccaatttaggactcaataagagtcaaataaaaagcatttctattgattcattaatagaaaaaattaatatatttttaaaatcaactcaggatactttacatccgttaggccttcatgcattaggagaatattggagtgaagaggatattgctagtacagtttctgcaatgctttctcatgattttgttttagagaataatcagggaacacttaatttatttacagaactttctaattattactattcaaaatcatatggtgatttaactccatttgaaagggaatttgtattgaataaatcttatgatatatgtaaagcattgatttattgggatgttaattctgtaagtaatgtattaattaatggcaatgttaaatttaacaattctaacttctatgcttgtttaaatttggctaaaagctacataaatcttattaatcaaagtatttcaaatgaactaaatgccatgcttgatggtttaaatggcagatatattcctacaggagaaggtggggaaattgttgtaaaaccaagtattttaccaacaggtacaaacattttccaagatcaatcatctgaactaccaacacaggatgcatggaattatgcaaaaattcttgcattattaactttagctgatttaaatgacactactgaaaaaattatcatggggatatggtgtgttgaaacagcaagggatgatggtgctttggtttcaactgttctttatttgttgggcatgaaacctgtttggacaaattcttcaagcgccggctttgatgatgaaggaaatcctactggaaaaaaagttggtgcaatgcctgaagtcattaaattaaatgatttaactcgtcctgagggttggaataaaaaaagaatagatgttaccataattactagcggattattcagagatttatactcttctcagtctgttttaatggataatgcatttagagtagcattggcaaggtcatatttaacattaattaataataaaactttaatgaatggaaaatatggcaaggaattaagacaggcattggactgtgtcatggagggtataaattattatagggcttctaatgaagctttaaaagataattatgttgctcagcattggattaaagattgcctatattatttgagtattggttataatgcatcttatgcaggggaatgtgcaattacccgtatattcgcaccacctaatggagattatggtgcaggaatatcaaaattggtgtcaatgtcatggacttggaacaacacagacgaattagctcagttttacttaggtcgaatgggaaatatgtattctaaaaattactggggagatacaaatccattagtatttctaaaagcattatctaactcagacacaataataacaagccgcaatacaaatcagtatggtgtaatggataatgatgacttctttgattattggggtggtttatcaatggctgttgaacatgtttcaggtaaatctccaaaaatgaatgttttaatgtatgctgataaggataatgcatatatttcttcgcttgaagaagtcatgtatcgtgaaattgcttcaaggtatgacaatcccgaatggattaaaggaatgatgaaagaaggatacagtggggctcgttatatgtccaataaatttgttagcaatctattgggttggcaagtgacaagaccggattcagtttcagatgatttatggaatagggtgtataatacctattataaagacaaatacaatctgggtgttaaggattggttaatgagtggaaataatgcctattcccttatttcaatgagtggaacaatgttgagttcaattcataagggatattggaatgctgatgatgcaacaataagagatattgcaaatacttgggcgcaggcaacagttaaaaatggtgttgcatgttgtgattgcagctgtggtaatgtggctatgatgcagtgggcagttcagtatgtaaatcctgatattttagcacaattattgccgaaattatatgatgcaactgaaaatccagtattcttaaacaatactcataatccaaatactaaacctgaaaacaataatgatcctcaagtagaaccttcaactccaaatcctactgatggttcttcttctagttcaactatttctaataatgcaacttccacaaattctaatcagcattcattaagcaatagtcaaaattcacaaggaaatgcggtttctgatgtgggagacagtagttccagtgattcaggtacttttagttctgaaggtgctgatgttaaaaaagcaattgaaattaatcctatcacccaacaatctgcaagtgaagttggtatgagtttacttgcagttttaggagtcatatgtttgatccttatagttggagtcggttattttagagataatggaaaagagaaa

SEQ ID NO: 76180 - DNA, 33 bp, Methanobrevibacter gottschalkii
  source 1..33: mol_type = genomic DNA
agtaatttagatgagctttttaatgaaaaatta

SEQ ID NO: 76181 - DNA, 36 bp, Methanobrevibacter gottschalkii
  source 1..36: mol_type = genomic DNA
acagaacagattacaggtttaatttattcttataat

SEQ ID NO: 76182 - DNA, 60 bp, Methanobrevibacter gottschalkii
  source 1..60: mol_type = genomic DNA
ttaccaaacatcacgtctatgatacaaaatcctatggatgcaattgaaatagcatctccg

SEQ ID NO: 76183 - DNA, 66 bp, Methanobrevibacter gottschalkii
  source 1..66: mol_type = genomic DNA
atggttacaacaattcctggaagtgaaatattaacttctggtttaaatatgatttctcaaagttta

SEQ ID NO: 76184 - DNA, 51 bp, Methanobrevibacter gottschalkii
  source 1..51: mol_type = genomic DNA
cctggacttgctgctttaggtgccggtgatgtaaatactctggctaatgcc

SEQ ID NO: 76185 - DNA, 210 bp, Methanobrevibacter gottschalkii
  source 1..210: mol_type = genomic DNA
agttggaacatgcagagtatagtgttttcagacacatcgcatgatcaatctcaaagcgttcaggattctcatatgaatgttactgaggtaagtgaaggtcaagaattaaatgacactttggattctgttgaaagttcgggtcaaggttatatggaaatgggaaaggtgtataaagatccatcaacgggaaaattaataatggttgaagga

SEQ ID NO: 76186 - DNA, 2508 bp, Methanobrevibacter gottschalkii
  source 1..2508: mol_type = genomic DNA
gctgatgatttacaaacaaaatatgctggtgaagtttcaggggatgttaatgtagttacggttaatccatggaccactagcggcagtttaacatatgatattccttcagaagctaaggatattaggagtgcagatgtttatgtaaatgtttatgggggcagtgctaagaatacttacggagcaaatgctaatgtaagtttaaaaactgcaaatggtgaaaatcaaatagctaatgaatcgttatggattgaagaaggaagtagtgatggaactatttatgctgtgaatgatcatatcaataaatgttattctgattatcagatgcattatgatattactaattctataaaagggcttaatggttcgtcaattacaattaaagtggatactttcaaaatggaaaataaatcgtttgatggtaaaattaaattaattgctttaattttagcatatgatgatggggacagtgatgtaattaattattgggtagatgcaacccaaaaatggacaaaaactaatgttacaacaatattcaatacagaaaaattatcaaacattaatggtgctaatttaatcaatgttgctctttcaagtggtgatggaagttttaaagttaatggtgaaataataggagatcctattgtccatgattctggtaattattatcagtataattcatgggatatttctgataaaatgaaaaaaggtcaaaatactgaattattatccatgaatgtggggtctggttcttatgcatctcttaaaaatgttttgtctgttttaaaagttaatcctattaaagcgaatgtttccctagcaactgagtatgctgatacttgctatgcaggtactaataatacaatttcaattaatgttatctccgataagaaagagaaatattcaatcgaattattagctgatggtaatgttgtaaatagtacggaaattgagttagatggtgaaaatcaaacaattttattcttaactgatcctactgttcgtgaagttgatgattcaactgttaatggggcagataatgttaaagtaaattatatggtaaatgtcagatttaatgatgttgttgtttcaagtgcaaataaaactgtgcctgttttatacaacggtaatcttggaaaagatttgtcttatccatcaagcggatttgcatcatttgaaaatatttcatttactggtgatattgtaattgatattaaaaatgaaagttcatataaatctggttctactggtacaattgaaattttcaatgttaacttaggtaaagattccactattgtaaaaggatttatttatgttccatacaactggtttaatggaaagaaatatgttgaaaatgaaaccatgtttaatgtaacattcaataatcagactatctgtccagctggattccatagggatcaaagtaacttaggaaattatggcaaatatggatatggggtagtggtttatgatgtaacaaattcaattaaaaatggtaataacacatttgtcttaaataaaattaacccaacaccaactatatatccaagtactttaatttacatgtacaacacaaccggtagtgaagtaattaaaaatatttacattattaatggtgcggatctactttcaaacacaagtaacaatgctggaagagtagttcaagcaaattcaaatattaatattaattctaaagatattcttgatgcaaaattatatgtatttgcttctggtgctcaaactaatgagggaaatataattataaataataatgtatttgaaaatgtttggaatggaactagtaaaactacagacttatttgctacagatataactgatattgtaaaagattcaaacgatattcgttttgttgctactggttctacaattttagctttacagcaatttattgtaaccactaaagatgctccaatcaaaactagtgtaaaaccaacaaaattatccactacttatgattcaggtaaatattttaatattaaagttttagataatcataaaaaatcagttaaaggtttaaaacttaaattaaaagttttcactggtaaaaggtatgcaaattattatgtaacaactggttcaaatggtgttgctagctttaaaaaagcttctaaattatctattggaactcataaggtggaaattacaacaaataataaaaattatgttgttaaaaaaactatttcttatattaaagtatataaagctaaaacaatcgttaaagcacctaaaataactgtaaaatttaaaaaatctaagtattttaaagtaaatgttaaaaacaaagcaactaaaaaagcggttaaaaatattgcagttaaactaaaagtcttcacaggtaaaaagtacaaaatctacaagattaaaaccaataaatacggtaccgcctatttaaaaactaaatacttgaaagttggtagccataaagttattgtatattctggtaattctaaatattcaattggtgcaaaaagttcaattaaagtaagatgg

SEQ ID NO: 76187 - DNA, 63 bp, Methanobrevibacter gottschalkii
  source 1..63: mol_type = genomic DNA
acaacaatttttaatggaatcaatagcatttcaaaacacacaggcacaatggattttaacaca

SEQ ID NO: 76188 - DNA, 48 bp, Methanobrevibacter gottschalkii
  source 1..48: mol_type = genomic DNA
tcagatattgtggatataggtattcaaaatgcaaatttccagtttatt

SEQ ID NO: 76189 - DNA, 36 bp, Methanobrevibacter gottschalkii
  source 1..36: mol_type = genomic DNA
tatgatgcaatgagaggttctatcctaaccggagat

SEQ ID NO: 76190 - DNA, 2124 bp, Methanobrevibacter gottschalkii
  source 1..2124: mol_type = genomic DNA
gcaacagagctgataagtgataattcaaacggaacgtgtattgtatcatcagctgctgttgctgaggataatcaaatattaggtgaagttgataaacctgatctggtggtaaatattacttcggataatattgatgattattttataagggggcgattaaaatccatttacgcatatgctacattatgcatatctgaagatattgatgatttgggcatattaacaataaaatcaaataatgttacaattaatgggaataatcacacattaaaaaatacggttttcagtattgaagcaaatggcgtaacattaaacaacatcattttaaatataactgaaaaatttgaagacaatgaaaactcagcaattttaatatggagagcaaataatgtgaatatttataatacaaatattaattatattcctccacaagatactaccgcatatggaatttattctgaaggaacaaaacgtagtttaaatagtaatttaaaaattattaacaacactattaactttgaaggaaacaacccatctgaaggtagggattatgctgtttgtctggaatactccccaaattgcatatttgaaaacaatactgttaatgccagactgccattaagaacaatagcattcgatttaacaacagcatatttatattcagaatttgcactggcaatggggataagcaactgcaataattcaacatttaaaggtaacattattaattgtgatgttaatgaaagacctgaatgcagctttccaacattggatgcaatattcatttgtgattcaaaagactgtgaattcatcggtaatcaattgacgttaactgatttcaaatcatataaaaatcaaccaaattacttgtatggtttagatatttatcgagctgataatctacttgttgaagggaataatattcatgttgaaacaagtggaggaacttttgctgcaggaactgcttatccaatacaattaacagggcctgcaagtggaataatcattaaatataatgaaatattttcaaaatgtaatggtccaaatattggtatatactcacaaaacttcaatggtgaaaattatattactatcctgaacaatcatataaatgttactggacttgcaggaaatcatagttgggcactggtagcgggaattgaagcacaagacgataatgatattataatgaataatattatagaaattcataatattcgcaaaaccaccaaagaggataacttatatggaatatcatattcacaagaaacaaaagggacacactcttataaagtagttaataatactgtaataagcgacggatactacttatctcatatgttagatgcagacaatacaacagtaactaataatacattagttcgtacatataaatatgcagataccaattatgatccattcaaacgtggggatgcaataggtaaagacactgatgaaatcaaaaataatgatttttcaggaaatcgtgttatcacaatatttgaatatgaaattgaacaacagggcgatgaaattgatgaaggggatgaattcaactatgaaccaccaactaatactggaaaccattccaatattattaatggaagtggaatttctccattaaaaccaggattccccggaggaaacccattaattcctggaagcaattctggaggaacaataaacaccggaggtaatggtaatgttggaggattcacaaatcctgatgttgcagatggtgataaggggtatattggtcttcctgacttaagtggagatgatggtaaaagtttatcccgtaaatttaatcagagagctaatgttaaaacagttaattcatttaataatcaaggagatgcaagtaactcttataacaatcttgtatcaactgaaaactcaacatctagtgaaagtcccagtgttaatggagtaaccgctagtggaactatttctaaatcagcatcttcagccggtgcagctggaagtagtggtgcagcacaggaaagtctaaaagcatatgaaataactaaaaatattgtagaaaatggtccttatgatatgataagattcataggattggctataatatgtgaacttctacttattgttggatacaaacgaaaa

SEQ ID NO: 76191 - DNA, 5472 bp, Methanobrevibacter gottschalkii
  source 1..5472: mol_type = genomic DNA
gataacgatacttttacaacaaatgttagtcagaatatttccaatattaatacagatgaacaaataaatatcctaacacaaaaaacagaaaatatcaatgaaatacaccaaacaacagaaaatgatcaattatcattctctatgcatccgccagacgataattattataataataaaaagggtgaaatttatcatacacaattaatattaacaatcgaaaatttcacaacattcagtactgcaaatactacaatgaatgtccatctagattgggacttatacatgtcaaaagattattatgatacatgtcagatacgaatatatgaaaacaacacaaaaatccatgcatttaacgtatccgaccaaaataatgctgaatatgaacacaatgcccatcaaacactagatgtaacatttccatatacaatcaaagatagaactgaattgaaagccgtgattttacaaattgaatcaaatacattaagttttgaagaaataaaaaaaattaacttaactaatttaaacaacaataatattatagtcaataatacttatttttcaaatgaaaactggacaaatcaaatcaaatacttaaaaaaagcaataaatgatgcgccaacaaatagtataatttacttaaacaatatggaaatactgaatgatgaggatataacgatcactatcgataagaatatcacaataatcgcaaacaacaccataataaatggattggatcatggaacaatatttacaataaactcccaagcaacactaaccttaataaacctaacattcaccaacatctccactaattacataatgcagaataatggtaacttaaaaattgtgaacaataatttcaacaacaatattggaagattaataagtaataatggtaatttaactatagaagacagtattattgaaaatacaacaaaatactatgcattattccttaacaatatcaaaacaacatccgaaaacggattaatatacaataaaaaaacactaaacattaaaaatactacttttaataatattaatttgaatccattaacaaacaataataaaaaattagattggaatgcaataatcgttaactatggtaaagccattgtaactgactcaaaatttacaaacatcaattatagaacaatatacaataatgcaatacttgaaataaaaaacacaataatggaaaacataacctcaacagacattttttctcatacaatacaatacacccggcaattaaataatactggaaaatatttttcatatatacgggcaacctcatctcttgaaggaggagcaatatacaacatcaaacactccacaataacaaacaccacatttcaaaaaatcacaggaaaaagtggtgcaatatacaataaaaaaacactaaacataacaaacaccacattccaatcaataaacaatggagcaatatacaacaacgaagatttaacaatatcaaactccaccttccaaacaataagcggagaagcaatatatactaaaaatgcaaatataaccaatagtagatttcaaacaatcagtggaaaagcattatacaatataggaacactaaacataaacaatatattaataaacaaatccacaggaatacataatgatggaatattaaccataaataatacgataataaataaatgtggaggcatatataataataaccaattaaatgtcaataatacactatttaatagatgtagtggggttggtgcagcagtatacaataataatattgcaaatattgaaaactgtgaaattatagaaaaccatggagatgctgataccaagtggagatatgtagagcagcctaatggtcaagtattttcatatattgttgaagtatattccggtgtaatttataattataaaaatgctaaaataaacattacaaaatcaattattaagaacaatgatatttcagaagaaagcaatggtaactgggatacatattatggaatcattaaaaatgatggggaaatgaaaataactggctgtattcttgatggtaataaaccaagagagtggattgctttttggggtggtgatggttcaataaacatttacaatactggaaagttaacatataaatacaattacctgctaaatacacaatattataccggaaatattcataaaccaagcagttttttatttaatactgggaatggtgcatgtgatgtcaattataatttttattgtttaaaaccatccagtatttttgcaaatgcaaattataattattattttgttccttattttggtgagtatattccgattaagcttaatgaaaccagaaatatcactttgtcattaggtctgaccaatggtgctgattatatgaccttcaatgattgggacaaattattaactccaggattaaacgcaaccattacaacaattgatgaaaacggtgaatacaaaaacataacaacacttctaaaagacaaatacacatttaatttcaactacacccatgttaaaggcgaatacataatatacagcaatatcttgaattttaagagtagtgctttggttgatgtgggaaaagaatttgcagaaatggaagtaaactacaataacataacctataaagagggcaacataacattccatattaaaattaagggaaatctcaccacacaaccaaccggaaacataactttaagatacaacaatgaaaaaatcatattgaacctaacagattccgaatgcagcttcaccattcctgaaatattaaaacctgacaattatactatgaggattgattatgatggcgatgatgaatattttaaaatactaaatcagtattttatttttgctgtgtataaaatacctaccaatattactgtagttgctcccgaagttaaatatggtcaaaccggtctgataacaatcaccatcacaccaggtgaggcgaaattaaaaggtaaactatacattaacggaatatacactaaaaatgctgatacacagggccataggattttgaggattaataggaatcctggtgtgtataatattagtgtggtttttgaaagtgatgagtattatatgggtggtgttgcaaacactacttttattgtaagcaaatggaaaaccaatttaaccttaaccggcaaggatattaatgctggtgaggatgcaattgtcaatattacaattgatcctggtgatgttcgaggtgatgcgatattgattattaatggtgtgaaccaaacaatatttataaacaatacagtaacacctattactattagtaatcttcagaacggaacatatcatgttagtgtttattatccgggtgataaaaaatatgctccatctaatgccagcactacttttactgtttcaatgaaaacaacaaaacttacagtaaatatcactaataatgatgatttaaccggcaatatccatgttaatactgattataatgattgtactggtgaagtgggagtgtatattaataatgataatgttttgattatgaatttgactaacgggtcttgtaatttccctgttaaattcaaaagaggcaacaattacatctacatacattatattggtgataaatattattcctatgcctcttggaacactacaagatttattgagggaaaagcaattatcaacacaaactacaaccatacaatcgatgagcaggaactaggttattacattataaaaatatttgatagtgacaataacccttatgaatatacaaatttcactgccttattccagaataaagaaatacatttaactactgatgagaatggtgttgcaaaactgcctatacaatgcagagccggaacctacaacataacagtcaaatacaaaaatacagttaaaaagagtactgttgtggtgaatgcaaccagaatggatattgatattaaggacattcttgcaggtgaaaatgaaacaatcacaatcagattaccttacaatgcaactggaaacattacatttaaagtagataatactgtaattagtaaaagattgagtaatggtcttgcgattgtcaatatttctgctttgactttaggagaacataaattaacagtattctatagtggcgacaataattatactgatcagaaaatagaaaaaatattcagcatcaaacattccctatcccaaatcattgcatcatcatccggtgtcacatatggtgaggatgttattgtcacttcaaaggttacatcaggcgcaagcggtagtgtgacatttgtccttaaccatgaaacaataactgtgaatttaactgatagtcaggcaaatgctgcatttactaatgttcctgcaggaaattatgttataactaccaggtataatggtgataagacatataaagggtctgtttgcgatgttaaaatcaatgttaaaaaagcagtacccaatataatggttaatacaagtcctttactgttaaatgaaaatatcaggattgatgctttgctaaacaatgatgccatgggtaatgtcaccttccatattcagggtcagtattcaccaagaaacagaacagtgaataatggtgtcagttcatggctaatcagtccattaagtaaaggttcatataatctgattgtaacatactgtggtgacagaaattatgaatccataacaacttccaaaatacttgtattgaatcagaatgagactgtcttgaatgttaatattggtgatgtaaatgcagatgatgatttaatggtatatgcaacactaaacagtgacaataagtataaaataacaggcaacattactcttgagattaacgataaatactataaggttgttgttagtgatggtgtgggattaagaaatcttggtgagtttaaagccggcagatacacttatactgcaacatatacaggttcagatttgttttcaatgtccaccattaaaggttcctttaatgtaagatgcaatagctataagataacaggaaataaaaatattgttcagtattatggcacatacaagtcttataaagtgcgcttattaaacaataatgtccctgttaaaaaagcaattattaccgttaaaataaataagaaaaacattaaagttaaaactgacaataaaggttatgcaacattaaaacttaaattaaaggccggtaagtatagcattactgcttcttacaaaaaagtcactgttaaaaataaggtaacagtgaaacctatcctgataacaaagaacatggtggttaagaagggtaaaacagtaacctatactgccaaactgctaaacaaatatggtaaaaaggttaaaaataaaaaggttatctttaaggttaaaggtaagaaatatattgttaaaactaataagaaggggattgccaaaattaaaattaaaaagctgaaagttggaaaatataaaatacagagcatctatgggaaagttaaaaacaccaacaccataaaaatcaaa

SEQ ID NO: 76192 - DNA, 2511 bp, Methanobrevibacter gottschalkii
  source 1..2511: mol_type = genomic DNA
aacatagatgaaattggtaattcatcatctgatgacacgattagtctagatgatgatataagtactatcaatattgttgataatgagatttcaactaatgttgatggagaagtgatttgtgatggtaaatcaactcgagatacatattcttgggctgattttaaatcagaagtcgaaaatgcgaatataaatacaatagaattaaataaaggaaatattgctccatcaagcgatagttccaatcagattagtataaaccatgacataaatattattggaggttatggttattatatcggtggtgacagttggagcagttcaacaaaatacaactatattccaattattacttctggatctaatctgaatgtaaaatttgaaaatgttacattccaatacttatctgacaatgtttttatgaaattgatgggtaacggaaattatacatttaaaaactgtgtatttagcaatattaatgcaactggatcacatcagtcagtaatctggttaaattatggacatgcattaattgaaaactgttcttttataaaatgtaactgtagtttcggtgcggtaactaattattattcctcctggggtactgctgttaacaatgctagaatgacagttagggattctacatttaaagataattatgctactactgaaccgggagcaattaataattgcggacaattagttgtttatgattcaacatttgaaaataatgaagcagtttggtgggcaggagcaatccatacacacagtaatgcaaatacaaccattattcgttctaaatttaaaaataattatgcaggatggaatggtggtgcattatacacatacagttatttaactgtcatcaactcaactttcacagccaatactgcaaaaaccaatactggtggaggtgctattggagcaagcagttatatgagcacaccaaaagttgttattaaaaattcagaatttaaatacaacactgcactaacaggtaatggtggagcaattgttataagttcaggaacattgaatgtggaaagttcagaattcacaaataatactgcacttgaattaaatggtggtgcaatttccagcagcagctgtactgcagcaatctctaactgtaaattcataaacaatactcttaataaaacagcaggaaaaggaggtgcagtttatggtactggaaaaggcagattaacagttgataaatgtgaatttattaacaatgctgctaaagacaataactctggccatgcacttgcatattattatactggaaatagcaatactgcagcatacttgacctataccaataatatattccgtggaaaggataatggtactgggtctgtttttgtagctaatgataaagtaaatattgttcaatacaataatagtattgatgatattactaattacattgaacctgaaaacaatacaaatggcactagcagtggaaatataacaatccctataggcactgatatactttcatctagttgggatgttatattgggtgacaatttaaatggtacctctgttattgcaggtaattatattctaattcctgcaagtcatgatttgtactgttacaattacatcacccaagatcttgtttggaatttcacaaccgaatttggttatttccatgagttattggtggatggaaatattgtttatgcacctgcatcatgggacgcattatatatctttaacttgacaaatggtgaatctttaacttattcaaacatttatcaaggatccagcctctataaaccagtaatttataataatactctttatgtaagtagtgaatacggttatggtattaattccaataattggatttccatgattaagcatgattctgattactactactatggcagtattttagagctaaataatgtatcttatggcactcctgcaatattgtcccaaccatatatacacggcaatactctttatgttaacaccatacaaggtttaattgcctataatttagttgatggcactagccataatgttagtggcactgtaggtaatcctattattgatgccaatggcaatatctgtattctatcaaacaatggtgctgctatttcattacttaattccaatttagaagttgttgcttcaaccacactagatggtacatgcaacaagttaattagtgatgctaatggtaatatttacactgttgataacaatggctatatctattatgctacatacaccagttcatcaataacctgcagtaaaactaaattcaacattaatcctgtttcatcagctatggcatgttatgatggtaaactttacataggagacaacaacggaatactatgggcatttaatactagtaaactagatgaacccgtacttaataatgctgtatatagggtttttgatgctggttctgcaattgtaggaaatattgctgttgataatgatggcaccatatatattggtacagataatgggcatttttatgccatagaatat

SEQ ID NO: 76193 - DNA, 4500 bp, Methanobrevibacter gottschalkii
  source 1..4500: mol_type = genomic DNA
gatattaatgaaactaacttaaatgcagattcttttgaaatagattatgatgattcaatttctagttcatatgatacaaatttacaaaaattaaatcaaaatgatattgaaaaaactgatgaatcattagaaaaatcagataattcatcaaatagactattaaacgaagacaataataatgggttgttgggtgatggtgatggtttaaagcatctttatgttgcaccaaatgctactggtagtggtttagatgaaaatgaccctggagattttataacaatattaaacaatactgaagataatactgttatccatatgcttgaaggaacttacctactttcaaacattactccaatttatcaagatggttactatcactttatttcaattaaatcaaagaataatataagtattgttggagagaatccagataaagtaaaaataatttccaatttaacacctaaaaaaagaacttcgtttatatttagtttgcataatactaataattttaaatttgaaaatattacattcagtgctattaaaaaagatcccaaaaaagaaaagacgaagtcttatttccttttgaataagaataattatatttttgaaaattgtaaatttatagatgcctattccaaatttgctattatagaactggatgagggtactcatctaactattaataattgttattttacatcaacggatggacatgttggaagagaaatatctccaaggttattttgttcagtccttttaaataatactatttttaaaaattgttgcagatattctgattataaaataggtgttatgggtaattatagtatttttaattctcaatttctagaatatgatgataatccattattgtattttcaaccatattgtaatttgatttttgagaataattatgttgaccacccatacaattttgtttttttccaaccatctgatcattacgagggttcaaatagaatgttttgttcacatactactcttacttttttaaatggtgaggatagtgttaatgttaattgtggagatgttattaatcttaatgcttctttagtagatgatttaggtaatattcttagtctttataaattgaagttcaatctttttgaaaacgaccttacatatactaatggggtttatcaaaaagaagttactgttcctgatgtgcctggtgaatattacattgatgttagtgatgaaatgttcactaaatatctgggcaattgtacagtgaaagctcctatttttattgttaaagaagctcctgaattcctatttgatgataaaaacagcagcacttatggtgaggatgttattatcaatgtggattcactggatattccagatggaaagttaactttcagattcaacaatagtgaaataatcaaaaacatcacagactacagatgcagtattaatttgggagtattgcctgcaggtgaatacgcaattactgcttattatgcaggtgatgaagtttatggagctaaatcatacacaaaaacatttaatgtaactaaagcaaaatcaacaatcagcttaactaaaggccatgttgatgccattaaagataatggtgatgttggtttctacttcagcacaactgaaaatggcaatgaaaacaccataggtattattttaccggataatgcaactggtaaattaacatttaaattggacaccgatacttatagtattgacattaccaaaagaaaagtactgctcggcaatttggactatggtagttatattattgctgttaagtatgatggtgataataatttcaatgaaagtgaggagtgtacttttaccttagttaacagtaagccaagtgttgatttaaccttaaattacagtaatattaattacactaatccgtttaatgttaatgtaactttaaatcaggatgtggttaaagatacaatcatctttgaagttagagatttagaggacaatcttattaactcaactactggaattattagcaataaatctgctaatgctactttcacaggtctaaatgcaggtgaatacaatatcattgcaatttatgaaggtgatgaaacttattgtaattccattgcaagtcaaagatttaatgttaacaaaattgatttggaatactttacactaaaagctgacaaaacaatcagtattcacgataatattaaagtggaagctttaattccagtcaatgtaggtggcagcataactttcagaataaatggtcaggacatgactgttgagatttttaataatcgtgctgaggctattttcgataatccgggtttaggtaactatacagtttatgcgacgtttaatggtgatgataattataatcctcatgaggaaaacattaatatcactgtcattaaagccgatgctaatttaagtgtttctgcagaaaatgttgattggggagaagaattagttgttgttgttaaaaccgacactagattcacaggcaatcttagtgttaaaatagatggtgtggagaaaatagttgaaatcacagaaggtcaaggtaatgtttcattttctaatcttaaagcaggtaaatataatgttgctgttgaattcaatgagagcgaatttttcacttcatcacaaaaagacattaatgtaactgtcaataaaatagattcagcattaactctggataatgatgagatggtctttgattatggtggatctgcttcagttacatttggttatgatggtgcagttaatgttacagctgaagtagttaatcatcctgaggctgtaattaagattaatgaggattgtattgttgtttctgatttggatgctgggcaatataccttgaaagtcactactgttcctgatgaaaaccacactggtgtagataaagaatttgaagtgactgtcaataaaatagattcagcattaactctggataatgatgagatggtctttgattatggtggatctgcttcagttacatttgattatgatggtgcagttaatgttacagctgaagtagttaatcatcctgaggctgtaattaagattaatgaggattgtattgttgtttctgatttggatgctgggcaatataccttgaaagtcactactgttcctgatgaaaaccacaatagtgtggataaaacaatcagcattacagtaaataaggtaaatgcaaacatcaatattgaggatattgttttagactatggttctcatgacattacagtatttacaggtgaaggtattgaaagtgtcaatgcaaatatcttaaatcaaagttatgcaaatgtcattgtttcaggcaataatattagcatttacaatttaaatgtaggagaatatgttttacagttaattgttaatccagatgaaaaccacaatagtgtgagtaaaaatgttaaggtaactgttaataaaatagattctgttattgatattagaaatgaagtggtcttcacatacggtgatgctggttattgtgatgtttatagtgagggtgctgttgactttactgtaaaagtaatcaatcatccggaagcagttattaacatcaacaagaatggtattgtcaaggtttcagctttaaatgcaggaacatatattatggaagttaccactaatccggacactaatcataattcagttaccggtagagttaatgtcactgtaaataaggctgattctaaaatcattattccggatatcatatttgattatggtaattcaggtagtgtgaatattcttgtttacaatgcaactggaattggcaatgtcaatgttgttggtcatcctgaagccataacaaccattaatggcactaaaatcagtgttggtggtttgaatgctggatcatatattttaactgctactgcacttacaggtgacaattataatcctgtaaacgtcagtgccaatgttattgttaataaattaaccaccattattggtgttaaaaaggttaatggtgtttacggtagttccggtaagcttattgttactttaaaagacagtaatggtaatcttttaactggtaagttgttacgtgttaaagtaggcagtatttcaaagactttaactactaatcgccatggtcaagtctctgttaatgttgcatatttaattcctaaaagctataatgcaaaaatcagctttgctggtgataatgatttagtcgaatcatcaaatactgctaaagtggttatcaagaaagcaactcctaaattaacagccaaaactttaaaaacaaaagttaaaacaaaaaataaaaagcttaaaataactttaaaaaacaaaaaaggaaaagctcttaaaaatacaaaagttactttaaaacttaaaggcaaaacttataaagcaaaaaccaataaaaaaggaattgccacatttaaaataacaaaattaaataaaagaggaacatttaaaggaacagttaaatttgcaggaaacaaatacttcaaagccataaacaaaaaagtaaaagttatagttaaaaag

SEQ ID NO: 76194 - DNA, 81 bp, Methanobrevibacter gottschalkii
  source 1..81: mol_type = genomic DNA
ttaccaataaatggcatctatcattatgatgccgatttcatactcaacagtttcttattgcttgatggacttccatatgtt

SEQ ID NO: 76195 - DNA, 48 bp, Methanobrevibacter gottschalkii
  source 1..48: mol_type = genomic DNA
aatactggaatattccagccaacacagattatgaaatatccgccaaca

SEQ ID NO: 76196 - DNA, 33 bp, Methanobrevibacter gottschalkii
  source 1..33: mol_type = genomic DNA
gctgaacaattagttcaagcaatatacagttat

SEQ ID NO: 76197 - DNA, 36 bp, Methanobrevibacter gottschalkii
  source 1..36: mol_type = genomic DNA
attgttgcaccaactataggtatcagttcacttaat

SEQ ID NO: 76198 - DNA, 57 bp, Methanobrevibacter gottschalkii
  source 1..57: mol_type = genomic DNA
ccaaatattgcatcatcattaactaaaaatacaagcccgattactattgcttctcct

SEQ ID NO: 76199 - DNA, 66 bp, Methanobrevibacter gottschalkii
  source 1..66: mol_type = genomic DNA
atggttttaaacattccaggtggagaatttttaactggttctcttgatgtaatctcacaaagctta

SEQ ID NO: 76200 - DNA, 51 bp, Methanobrevibacter gottschalkii
  source 1..51: mol_type = genomic DNA
cctggacttgcggcactcggtgcaggggatattaatactcttgctaattcc

SEQ ID NO: 76201 - DNA, 198 bp, Methanobrevibacter gottschalkii
  source 1..198: mol_type = genomic DNA
agttggaatatgcaggctatgatagatccagatcaaagtatacaagaaaaaatgcaacaacaaaagacaaccgaagtggatcagggccaacagttaaatgaaactccggatacttcaaacagttctggtcaagggtatactgaaatgggtaaggtatacaaagatccagctacgggtaagctgattatggtggaaggt

SEQ ID NO: 76202 - DNA, 750 bp, Methanobrevibacter gottschalkii
  source 1..750: mol_type = genomic DNA
cttctttcaggtgttggaagttcagaaaatatagatattgtaggttctacatctgtgcaacctgtagctgagaaacttgtcgaaacttataaacaaacacaccctgatgctaatattaatgttcaaggaggaggttctagtgtaggaattaaaagtgcacaagatggtagtgcagatattggaaccagttccaaggagttaaaagaagatgaaaaacaaggattaactgaatataatattggtcaggatggtattgtaatagctgttaataatgaaaatactgtaaatgatttatcaaaagatcaattaaaagatatattctcaggaaaaatcaccaattggaatcaagttggaggtcaagatggtgaaatcaatattatcactcgtgaagagggttctggtactttagatgcatttgaaaatattgtaatgggcaaagatactaaaattagaagtgatgcagttgtgcaaagttctacagaagctgtgaaacaatctgtaaaacaagattcaaatgcaataggttttgtatcatttgctcacatgtcaaatgatgtaaaggcattatctattggtggtgtaagcccaagtactgatactattgcagatggatcatatgaattacaaagaccatttttattccttgttaaaggaactccatcaggtgatttaaaagaatttattgactgggtaaatagttctgaaggtcaaaaagttctaaatgaagaaaaaattattaaatcaacaaat

SEQ ID NO: 76203 - DNA, 81 bp, Methanobrevibacter gottschalkii
  source 1..81: mol_type = genomic DNA
ttacctgcttttcaagattatggtttcattcaatttttattcggacaaacttggtctcctaatgaagggcaatatggtcta

SEQ ID NO: 76204 - DNA, 33 bp, Methanobrevibacter gottschalkii
  source 1..33: mol_type = genomic DNA
agattctattttggaggtactggttttagtatt

SEQ ID NO: 76205 - DNA, 105 bp, Methanobrevibacter gottschalkii
  source 1..105: mol_type = genomic DNA
gcaggtaatgtacctggaattcctaattcaatattttctccagtaagaactttaacttcaaatattgctttggaaatgagttatgcaacaggattacatcacaat

SEQ ID NO: 76206 - DNA, 75 bp, Methanobrevibacter gottschalkii
  source 1..75: mol_type = genomic DNA
gctgttcctatattaagttttgattttatctttggtcaagttattgacgcaggtaaatctggtggaatttcccca

SEQ ID NO: 76207 - DNA, 102 bp, Methanobrevibacter gottschalkii
  source 1..102: mol_type = genomic DNA
gtaggttctgccactacaataccaatatctatgtttgatccaggtaggccattaccattgcatttatatgttttagcaacagagggggtttctttgcctaat

SEQ ID NO: 76208 - DNA, 42 bp, Methanobrevibacter gottschalkii
  source 1..42: mol_type = genomic DNA
gaacatattttaagagattatttaaatattatacatggaaat

SEQ ID NO: 76209 - DNA, 48 bp, Methanobrevibacter gottschalkii
  source 1..48: mol_type = genomic DNA
tttggtcaatccactgctttaacatttccaattcataatattccatta

SEQ ID NO: 76210 - DNA, 60 bp, Methanobrevibacter gottschalkii
  source 1..60: mol_type = genomic DNA
cctgaaataagtgatggcggacactttatgatggacatgttggatgtggctatgccatcg

SEQ ID NO: 76211 - DNA, 639 bp, Methanobrevibacter gottschalkii
  source 1..639: mol_type = genomic DNA
gaatctgatgctgttcaagatacgggtggggagagtacttcacgaatcattaatgtaaaagttatctggaatgatgatggccaaacaaataatcgtcctgattcagttactgtaaggcttttaaataatgggagtgttgttgattcagtaatattaaatgaaagtaatttttggaatggtacttttaaaatacttgataatggaaattatgacgttgaagagacaggtgatctttcttcatattcgatttctttaactggcgatatggataatggttttgtaattacaaacactattaagcaagctccaaataacggcagtgatgatatgattgttgatgaaaattctacagataattcatcagatgatgttaatggtattattgatgattccaatcatactgttgatcaaaatgatgctaaagatgaaaatcaaacagaaaatatttcccaagcaaaaaatacaacttataataataatgataaagaaaaacaggtaataaaaaaagaaaataaatctgttaaaaagaataatacaaacataacggggattaaattaaaaaacacaggacttcctgttgtggttttagttgtagtgttatttattatagtcattactccaatttcacgttggaaaaaa

SEQ ID NO: 76212 - DNA, 141 bp, Methanobrevibacter gottschalkii
  source 1..141: mol_type = genomic DNA
attactaatgttccgggcaatttagtgcaaatcattcaggaatattctacaagtataaatgcaactgctgctgttaactctactgcatccgcaatgcctgctgtatcaagtgctagttgggcagcattaggaacttcatta

SEQ ID NO: 76213 - DNA, 3579 bp, Methanobrevibacter gottschalkii
  source 1..3579: mol_type = genomic DNA
gataatcaaacaaatttaggtttaaacagtaatgatgtaatgttatctgattcatattattttgatgctaatgttgatgatgatttggggaatggatcattggattttccttataaacagttaaagagtaacagagttatagataattctacaatctatttaaatgatggaatatattatggatttaataaagaatttagtaatttaactgtaatcggtaaaaatagtgaaaaaactattataaaaaatattcaatttgatattaaaggttctttgataattcaaaatgtaactctgattaattctaaaataaccaataatgcaaatataacattggttaattcaatttttaaagattcttcatcattcattggaggagttttaaagtcaaacccaaatacttttgtaactataactaattgtacatttttaaataatcatgcaaataggtatgctggagttatttattcaaataattctaatttaaatatctgtaactcaagttttgttggaaattatgctaattattatggtggagctatttattgtgagaaaaattcaaagttaacaattataaatactgatttcacaaataatcatgcaaaaaatgatgctggaggagcaatatatggtatggattcagatattcttgccaattatttaagtatttcaaattcttcatccactttcggtggtgcaataactgcactcaatacaaatttgaatttaactaatttcaatgcttggaataataaagcaaaatatcgtggcggggttatttattcagtttatggttattatattgttatgaactccacatttgaaaataacacagcatctgatggaggtgcgttatttattgactcaccacattcagtgaatgtttcatcaaacaaattcattaaaaacaacgctttaaatattggtggagctgtttatataatttctaataaaaattatttcattcctgataatttatttttaaataactctgcaagttttaataatgatttttataaaactatgttgtctaatttaactattggaaataataattatgttttaattaattataatggatcccatataggtaatcttccaagcagttatgatttaagagaattaaatcagacaacttctgtaaaaaatcagggatctgggggtaattgttgggcatttgcagcaatagctagtttggaatcctgtattttaaaagctacaggaaatgcatataacctttctgaagaaaacatgaaaaatctaatgacattatactccaattatggatggaaagtttctcctaatgatgggggctatacttcaatgggcattggatatcttacttcctggttaggagctataaatgaaagtgatgattcatattatgagtcatctgcattatcaccagtacttgacagttttattcatgttcaaaatattctatttttaaaaagaaatagttatactgataatgatgaaataaaaagagctatcattgaacatggtgctgtttcaacaagtgtattttggaaagtagagaaatatgctaatggtgaaaattactataattatgaatatgcttcgggttctaatcatgcagtagttattgtcggatgggatgataattattctaaaaataattttattaaaaaggctccaggagatggagcatggataattaaaaacagttggggtactggtagtggtgatggcggatattattatgtttcttattatgatgcacgtttagcaccaataaatacttcatctgttacttacacatttgttttagcagattcgattaaatatgataaaaattatcaatatgatatcccaggaatgactgattatctattgaattcatcggatcgtgtctggtataaaaataagtttacagcgactgacgatgaatatttaaccgctgtttctacatacttccaaaaagaaacttcatgggatttgtcaatctatgtaaataataaactgatgttaactcaatcaggtaattctagtgcaagctactcaacaattgaattaaaccgattcataattcttaaaaaaggtgacatttttgaaattgaatttaaaataactgttgatggtgatgcaggggttccgatatcagaaatagcttctcttaataatctgttttatggtgaaaatatttcatatgttagttatgatgggaaaaaatggattgatttatttgatgtaagatggacatatcctggccatacatataatgattcgcaagtagcttgtattaaagcattcacggtattgaataaaattaactccactattgtcctaacaattacagatgagaataatccagttgaaataactgctaaagttttaaaccagtatggaaatcctattaaaacgggtaaagtcacttttaatattgaaggaaaagattacattgctaaaattaataatggatttgcaaaattgattcatatttttaatggaaatgaaaataaactaatcattgcttcttttagcggtgccggatttatcgaatctttctcagatataactttttgtccagagcaggtttcaattaaagcaagtgacatggtttcatattataataaaaattcttattccataactttgcttgacatatactcaaaaccggttgcagataaggaagttaaatttaaaatcaataatctggaatatgttgcaataactaatgaaaatggtattgccgcaattacatttaacttatatcctaatgtttatgatgttataattgggtttaattctatcaattttgataattataatgttactaaaaaaatcactatcaaatctacaatttccattccagaaaataccgtttatacctataattcaaaatatccaattaaattgttaaacaataatggaaatccattatccaattgtaaattcaaacttgttattaatggcataacaaattatgcacatactgattctaatggtgcttttaaatacaatattaatttaaaaccgggaaaacacactataacagttatcaatacaaaaacaggtgagaaatctacccaaaaaattaaagttgtctcaagaataactcaaaataaagatttttcaatgtattatggtgctggtagaaattataaagttaaagttgcagatgattatggaaaagttaagaaaaatcttaaaatatcttttagagtgaatggcaagacatattatagatatactaatgaaaaaggttatgcatatctaaaaatttctttaaaacctggaaaatacactataactgccaattataaaggatataaagtatccaataaaattcgtgttaaaccaacaatcataactaaaagtattgcagtcaaaaaaggaaaaacaggcaaattcacagccaaattattgaataacaaaggcaagattttaaaatataaaacaatcaatttcaaattcagaggcaaaacctacaaagttaaaaccaataaatatggaatagctactttaaagattgctaaaaaatataaaattaccagatattcaataattactagttatcgtagtgaaaaaataaagaataccattaaaattaaaaga

SEQ ID NO: 76214 - DNA, 3534 bp, Methanobrevibacter gottschalkii
  source 1..3534: mol_type = genomic DNA
ttaaacgtggatgataatgcgacaatagaagatactaatttgaattcaatggatgttaattttgatatttccaatggcgaattcaatagtattaatattgataaaacgttcgatacaaatatagatgctgatgcaggaaaagacacaaatattgaggaaaaaactattagtattactaattctaataattccattctttccactaaagagaataatgttaaaaataattttaaattaaattccggttcattaagagcaggtaatataatttatattagttctgatggtactggggatggtttgactagtaataatccaacaaactgggctaatggatacattaatgctcaatcaggcgatacaatttctttccttgatggaacttataatcttgtaaatgtaaatttaaataaagatttagttttaaaagcttttaatgaaggaaatgcaataataaatgcaaatagagctggtaatgtcttttctattaataataatagaaatataaccataaatggtttaacatttataaatgggaaatctactggaaatggtggagcaatttcatttaattcaggagccctaactgtaattaattgtagatttattaataatactgcaagttcttatggtggagcaatatatcttagagatggaaagttaaccatagtcaatacaactttcgtaaataattcagctgatgttggtggagcagcaatagcagacaccattagtattactcattctgatttcattaataatactgcagatggttctggtggagctataagagcttatgataatttaacaattgttgattctatttttactaataatacttctataaatggtcaaggtggagctttatatactccaaatgttgacataaataattcaatttttgttaataatacttcattaaatggtggaggggcaatatactccagcaatgaatatttaattaataattctgtattcgttaataactctgctattgatggtgatggtggagcagtttcatcatatcgtactggcaatataaacaattctaattttaccaataactctgctaaaaaaagtggtggagcagcatatgctagagagagtattgaaattgataattctagcttcaataaaaattatgctggtgctggtggagcagtacgtgctcaatcagaagttaatattactaattcaaattttaccaacaatgttgctaacaatgagggtggagcaatatattctaatggaaaaattgttgttaataatttaacttttatcaacaactctgctattgaaagtgatggtggagcaatattctctgtagaagatgttgaagtagataattccaattttataaataattatgcaggtgaacttggtggggcaataagtgcttataatgaacttactgttaataattctaatttcaccaacaataatgcaaaatattatggtggtggagtttatgctaatgtgttgaattctaatagagataattttgttaataatactgcagaatataatggtggaggagcttatgtattctctaatgctaatattaatgggtcaaattttgattcaaatactgcagtgaatggtggaggattattcagcactggaaattctagtgttaataattctaatttcattaataataatgcttatgatggatctgcaattattagtggaaatttacatttaaataataacaatttagaaaataacacatctagaggttatggaattgtatatgctgaaaatgcaactattgaaaataataaatttatagataatgatgcattagaagataaagaaatctatgtattaaatgaattaagtcaaagcaataatactttaagccctaatcaaatagaaaatattaatgctaatacagtaaaagtgaatactattaatggtactacttatttggttgatttagaagatgggttaaaaggatattgtttacaaagaacattaaatttccctgattatgtatatttattaaataatcttagtttagcacataaccaattaactggtgaagatgttagtgaatacttaaagattttaatttataaatattatttctcagataaaaaagacaatataacttacagtttatgggactttacagacagtgattttagaaatagtaataacaatttaactaaaaaagtaattgcattatataattctggattccgtgtacctgattctaatgctagtttaatattggataatggtactcaagtattatttgatttttatagtgctggaagttcaacaactcaaaatttattcctatttaatattacatatatgggaaacaattatgacatgaaagttgaaaaaattacattaaacaaatctgtaattaatggaaataaaacaaaattcataattagagtaacaaacattggtgatacaattctccatggtgttactgtatttgaaaaagagtatgatggtttagtttatgattcatatattgatgaaggaaataattggaattataacaatggtaaatggatttacaaaaaacaattaaacattaatgaatctgcagaatttactgttgtatttaaaacaataaaatccggtaatttcacaaatatcataatttcatcatccaatgaaactacaaataaaaccactaacaataccactactgtttacactcctaatctaactgttgagaagctttctttgaatagaactgtttatgttggtaatcagactgtctttactattgttgtccgtaataccggtgattgtgatttaggtgaggtttttgtcgttgaaaaagctccagaaggtcttgcttacagttcatttaaaggcaccgactggtcatacaacaatggcaaatttacttatggtaaaactttaaaggttggtgagtctgttagttttgagattgtattcgatgctgttagttctggtaattggactaatgttgttgttgcaggttcaaatttaacaggtaataaaactggtaataatactactaaggtttataatcctggtttgaaggttgaaaaaatcactttggatcctgttgtgtctgttggtgagattacatcttttgaaattatagtgactaatactggtgattgtaaacttggtgatgtttttgttcatgaagatagttatgaaggtttaaggttccatagtttcaggggtgatatgtggaaacagaaaggtgatactttctattatcagggtgttttaaatcctggtgagtcagcatcatttgtaattttatttactactttaaaacctggaaatttcacaaatattgttactgccggttccaatgttactaacaataccactactgaaaacaaaaccaaagtaatagaaaatcacactaacaataatactaatggtattaataaaacagttaataatgaaaccaaagaggttaatgttcataaggttgatacttcaagagcaactggtaatccgttactagcattactcatggttcttttaatgattagtgtgacttctgttagaaaattcaaaaaa

SEQ ID NO: 76215 - DNA, 4746 bp, Methanobrevibacter gottschalkii
  source 1..4746: mol_type = genomic DNA
actgataataatattacggatataaataatgttaattctaatttatccaatgtattgaaaagttcttctagtttaaatgatggagatgctatttcatatgatttaatggataataaagatgttatttctcaaaaattttcttcaaatagtaatacaaatgataagtcaaatatgtctgatgtggttgattctattgaatctgttgcagaacctactagtttggatagtcctatactcaggtctgttgttcctagcggcattacatttgatggagttttccatgttggtactggacaacaatattcaaatatacaagacgcattagatcaatgtaggagaggcggatataattatcaaattattatacatgaaggtacatatactggatatggtaataaaaatttagttattgagcctactacttggtggaaccctaattttggttacttggatattagaactgcaaatgatggtgatgtggtaatattaaatgcagaaagatctccaagcattttaactattaattctagaaatgttcatattactggattgacatttatgaatgcttataattatggtagtggtggaacatctggtgctggtgttgctataaatattaggaaaggaactgtatctatagataattgttcttttattaataatgaagctagaaatctttggggaggtgcagtccatattgattcaagtataacaaatcgtatttctaatatagatattacaaactctttatttgttaataatagtgctgaggtaggtggagcattccgttctgaaagatattctagtaatattaatataattaatactacatttattaataatactgctactgaacatggtggtgtagcatgtttatttagtacagatgtgacatttgcaaattgtacttttataaataactctgctccttcatctggaggtattcattttcatgttggcggatcacatatcgataattgtacttttataaataatagtgcttatggtactggttcttctgaagaaggttatggtggagctattgcgttagtttatagtactagtgatggtgttattatttctaattctagtttttccaataactttgccggtaaatatggtggtgccattgatgtaaatggcagtggtagtaatgctaaaatattgaactgtaattttgaaaacaatactgccggttatggtggcgctatccgtgttcaaggttctaacactgttattgataataacagtttaattaataataaggctattaatactgatggtggtggaattcatgttgaaggtagtaatactcaaatttcaaatactatttttagaaataattctgctgctgctaatggaggtgctttagctattgttgctggtgataatacatttgtttccaattcagtcattgctaataacactgctgtgaatggtgcgggtgcttatattcaaggaagaagagtaactatatccgattctattgtcgctaacaatactgcagaccaaaatggtgcaggagtttatattgatggaagttatgctactataaaagactctactatttataataataatgctactgttaatggtggtggagcttatataaatggtagggatgctactatctccaatgttaactttgtgttaaacaatgctattcctgatgaagaagctttggatgatggtcttggtggagctatttttattgctggtagtaatagttatattgaggatagtaattttacttataatactgctcgtaatggttctgctatttatatagatccgacaagttctatagcaaataattatatttataactgtaatttcactgaaaatcaagcttggagttattggttacctattttctataatgatgtaactaaaactattgaatctaatttaactggtggaaataatatattaaatgctatttacaataatggaagtaacttacatattttcattgatggcgtaaatcctgttttgggatgggaaaactctcaaaatggtacaataatgtatcaagataaccgtgagtttaatcaaactattgtaactcttgtttgggataggcatggtaatttagtatttaatgaaactgcagttactgatttagcaggtaatgtttgttatgatattcctcaagatacacatttatggtttatagttagtatgactcatttagaggatacttattataaagaaattactaatattacgggtattaatattaatcctggtttgactattactgatgtaactatgtatgagggtaattcaactcctcaaacaatatatattgttttagctgatgatgatgctaatcctataccaaatgaaggtccaatcatgatttatgtcatggttaatggtaataagattcttcttggtagtggtaatactagtaagaatgcagtattgattcttaatgaaagtgctgtatttaaaacattaaatcccggcaattatactattattgcagaatgtacatatgcatattataatgaaactactcaatccatatctaataaaactgtatcaactgaaggtattttagaagttcttccatatatctggagtcttaataaaactatttctcatgttaatggtattccatatattgagggtatggttatccagataaatgataatgttacttttaatataactgtatttaatgaagttaatactacgttatatggattaaaattaattgatttaaatactgaaggattaagttatgtttctactttaccttccaattggaattatgaaggtaataatgtatggacattagataatctagttaattatggaaattcatcattatttgttacttttaaagtacttaaaactggtaatttaactaatattgttaattgtagttttcttgatggttttaaaaataaaagtgctaacattacttttgcagttaatttaactgctgatttgggtgttagtaaggttgttaatgtttctaatcctaattacggtgattttattaagtatactgtagttgtttctaatgctggtcctgatgatgctactggtgttgttgttaatgagactttgcctgtgggtttggtttatgttagtgatgatgctagtgttggtagttatgatcatgttgctggtttgtggactgttggtagtttggctaaaggtgatagtgctactttgattgttgttgtgcgtgttggtggtactggtaatattcagaattttgtgaatgttagtggtgctgagtatgataataatactggtaataataaggccaatgttactgttgctgttaatgctagtgctgatttgggtgttagtaaggttgttaatgtttctaatcctaattacggtgattttattaagtatactgtagttgtttctaatgctggtcctgatgatgctactggtgttgttgttaatgagactttgcctgtgggtttggtttatgttagtgatgatgctagtgttggtagttatgatcatgttgctggtttgtggactgttggtagtttggctaaaggtgatagtgctactttgattgttgttgtgcgtgttggtggtactggtaatattcagaattttgtgaatgttagtggtgctgagtatgataataatactggtaataataaggccaatgttactgttgctgttaatcagcttaaaacttatattatcgtttttaataatactgtttatcctggtgatgatgttactgttattgttactgttactactcaaaacggttcattatttaatggtaatgttaatgttgctttaaatgatactgcaaacactactaaagtggttactattgttgatggtactggtagttttaaggttacagttgataaaaatcttgttaatggctatgtaattggtattaatgctagttatgatggtaatgatacttatattggatctaaaggttttggttggattaaggttttaccagtcaaattccatgttgaaaaaactattgtaaaaggtaatgaatttttcattggtgatgagataatatttaatattactgtttataatgattgtaatggtactttatacaatttagttgttagtgatgttcttcctaatggtgttgtgcttattaatagtggttttgggctttggacttatgatggtggctcttcttggagttatggtgatttaagtgcaggcgctagtgctactttgattattaagtctagtgcagttaaagctggtagtttcactaatgatgctaaagctacagtaaatgatgttcttgataatagtagtttggttgatttcagtatttcaaaattaaatactagtatcagtgtatctaatgttacagggcatcctggtgatgtagttgttataactattaaagttagtactggagataatgttccgtttaatggtgatgttgatgttattttactcgatggtaaaaaaattattgttcatgtaactaatggtattgctaagtttaaatggactattcctaaaaatgctaagaataatactatatttagtattttcgtatcatttgctggtagttcaaaatactttggatctaataatactggatttatcaaagtaattgataataaacaaaacaaaactaatcatacagataacaatgattttactgataaatgtaataaagggattattaaaaatactggtaatccattattagttttattaatttcaattgttattttggttatatcattaaaacgtagaaaagactat

SEQ ID NO: 76216 - DNA, 42 bp, Methanobrevibacter gottschalkii
  source 1..42: mol_type = genomic DNA
tcccaaacacctgctaatgatgataattctattcgttttggt

SEQ ID NO: 76217 - DNA, 81 bp, Methanobrevibacter gottschalkii
  source 1..81: mol_type = genomic DNA
aatgatttaaatattgtttccacagcaattaatgcatttttacaaatgggttctcaaatcatctcatgtatggctgatcct

SEQ ID NO: 76218 - DNA, 45 bp, Methanobrevibacter gottschalkii
  source 1..45: mol_type = genomic DNA
gctggatttgaatctgttggtgtaactaatgtcacaggtttcggt

SEQ ID NO: 76219 - DNA, 105 bp, Methanobrevibacter gottschalkii
  source 1..105: mol_type = genomic DNA
tacaccactattttaggtggagaggatcaagctctcattgctataatgaaatcatctccattatcatttaatggtgtttttactgctttatcacaatctgatgct

SEQ ID NO: 76220 - DNA, 60 bp, Methanobrevibacter gottschalkii
  source 1..60: mol_type = genomic DNA
ggtgatgttggaactgctaattatttggtgggtgttcttaagaatacattgcctcaattt

SEQ ID NO: 76221 - DNA, 36 bp, Methanobrevibacter gottschalkii
  source 1..36: mol_type = genomic DNA
gcttgggcagtaggtagtggtgacatgtcatttact

SEQ ID NO: 76222 - DNA, 450 bp, Methanobrevibacter gottschalkii
  source 1..450: mol_type = genomic DNA
aattcattcagtttgattttcaatgataatggaactaatgatgccaatgatgttaatgaaagtatgataactgtaggagcaagtagtttgcccgaaattgaaaactttacagacaatactttaaatgatacaactattagtttagttgattcaaataaaaatatgacaattctagtttcagaaattgataattcccaatcaattagtgatatcttcaataattttgtaagcagtaatgatattagttcaactcagactattgatcaaaatggtgtaacaacttatttggcatacagcagtggaagtgattcatataatgctgatattttctttaataaaaatggtcaaaattattgtattagtggagataatattttatcttcagatagtgattactttataaatcactgtaaaggtattatagatgcaattagtataaattcaactagt

SEQ ID NO: 76223 - DNA, 39 bp, Methanobrevibacter gottschalkii
  source 1..39: mol_type = genomic DNA
gttccagcaatagcacaggattttgctatgaataacgtt

SEQ ID NO: 76224 - DNA, 33 bp, Methanobrevibacter gottschalkii
  source 1..33: mol_type = genomic DNA
taccatttacagtatgtaaggggttgggatgca

SEQ ID NO: 76225 - DNA, 54 bp, Methanobrevibacter gottschalkii
  source 1..54: mol_type = genomic DNA
ataatgggtaatttagagttatctccacagtatacaaccatgattatacaagct

SEQ ID NO: 76226 - DNA, 621 bp, Methanobrevibacter gottschalkii
  source 1..621: mol_type = genomic DNA
gttggaaatagatttttcataccgcattatgaaactattgcagacactgatataggtactgtagaagtggctacttatggaaatgcaaatgctacaaaatgcattgcattaattactggaattcatccaagggaaacactggctattaatccggaaattgatgcagcaaaacaatttgcaaatgatgatgttaaaataattcattataaagtcactgttacaaaaaatgcacaggactatagtaaaggacgtgcaaatggtgaaagtcttgttcataattatgtaaatccgaatgttactgcttctgatgctgatgctgttattattagtcattcacatattcctgaatatggtgaaggattttatgtagctactccagcaatggacaatgcatctgttaaaataggtgagaatataaatcaatcaagtgattttaattattatccggtcaccggtaatgaaacatacaaatcaacttctgctgtgcttgtttcaaaaccgattgctgaagcaggttatccaacatttgtatatgaagttccagaaaatgtcatggaatttattataactggcaaaacaaaggatttattccagttaattattgaaaatacttatgataat

SEQ ID NO: 76227 - DNA, 2883 bp, Methanobrevibacter gottschalkii
  source 1..2883: mol_type = genomic DNA
tcagataatacaactgatgactctgttattgattcatctaatcgagatgttgttagcgtagatgataataatgttgttagtgatgaatatgcggttaataaagtttctaatggggcgctggctgatgttaatggtgaagaaaatgtaaataatgatgttgatatggttatagatcctataaataatgtatctgtacttcaaggcgataatgttgatgtgaacattactgttaagaatataggggaaaataatgcttctaatgttacagttaattttgaattaccggatggattttcattaattgattctaataatgtatcagataatacttggcatataggcgatttgcagtcaagtaaatctactaacatcactgttaaattaaataatagtggaattaataatggtgattatgttattaacttaacactaagagctaatgaagggattgaagaaatttttaaacagaatgtaactgttaatgttataaaaaaacttattcaaacaaacttaactattgattttgataaagagtcatatgtatatggtgatgatgttggaattgatgttaagttacctgatgatgctactggtaatgtgactataaaaatcaatggcacagaaaataatgcaagtattaatgaggtattgattttatctaatttgactcctggcaattatgaagttaatgttacctatagtggggatgataaatataatggaagctctggtaaggctagattcacaatatccaaagccaacacaacagctgcaattgatattgtcagtattaaagttgatgatgagttaaatattactattaattatgattctgaaattaatggtaatgccactatttatgtggataatattaaaaatcaaacaattgaaattattgatggaaatggaaatgttactattaaaggattatccaaaggaatgtatgatattaaagtagcatttgatggaaatgattgttataattcatccgaaactaacaaaactattgaaatatctaaaaacacagtaaacatgttgatcaatgtaggagatattgtttatggtaatgatttggttattaacctcaaattacctgataacttaacttcaaatgtcactgtaagtttgggtgatattaatagaagtattaattgcagcggcaatgtaacatttaaagatatgaatgctggaaattatactgcaattgtaagttatggcggtgatgaaaattactttaatgaaacaaaatatgttgattttaaaatatataaagctagtacacaaactactgtcaatacatcagatattaatataggcggagtgttaaatgtcagtgttgatcctaaaattgatggaacagctactgtttatttaaatggaactaaatattcagatgatattgtaatagttaatggtagtggaaatgttgttatttcaaatttaatcgaaggaacttataatgttcttgctgtatttaatggaaatgataattataattcctcattaaccaataaatccattaaagtatcaagaaatgtttttaacattactgttaatgttactgatgtttgttatggtcaagatgtaataattaatattacattgcctggtgatgttaccaacacagtagatgttgtttttggttataactctcaaaatattaatcttgaaaatggtgttggaactgttaaatttagtgatttggatgtgggaaattataatgcaactgtgatatattatggtgatgctaaatacttaaaaagcactcaaatcattagtttcaatgttactaaagctaaaccaacagttgatgttaatatttcaggcaataagcttggtcaggatttagttataaatattgcattgcctagtgatgtaaaaaataatgttactgttggaatagacaatatctctcaagatgttaaagttacaaatggtgtgggtaaggcaatatttaaagatttaacaattggagagcatgttttgataattgattatagtggtgattctaactacttgaatactactgaaggaatttatttcaatgtatctaaagcaataccggtcattgatattgatgttaaaaacatatatgttaaaggtaaggaagttatagatatagctcttccagatgatgcaacaggttctgtaactatttttattaatggagttgaacaaaaaacagttaatgataacattagcagcattgttttaaccaaatctggtttggctgccggaacttataatgtgatggttagctatactggagattctaaatatgaatctgcaaatacaactgttcaatttaaagtttcaaagtacaaagctaaattgaccgcatcatcaaaaacttataatgttaaagtaaaaaccaaatattactacattactttaaaaaacaacaagaataaagtaatgaaaaagattaaagtctatttgaaagttaatggtgtaacatattccgctacaactaatagctatggtaaagcatctttcaaacttagtaaattaactaaaaaaggaacatatgatgctttaattacatataaaggcactagttactataataaattaactaaaaaagttactattgcggttaaagcaactccaaaattaactgcttattctgcaaaattgaaaaaatctgttaatgccaaaaaatatagtgtaactttgagaacagacaaatataaagcaatgaaatatacaaaagttactttaaaagttaatggtaaaatctatactttaaaaacaaatagtttaggtaaagcaacttttaaaattactaatttgaataaaaaagctaaattccttgcagttattagttattctggtagtaaatactattattctgcaactaaaaaagtgatattgacagtcagg

SEQ ID NO: 76228 - DNA, 54 bp, Methanobrevibacter gottschalkii
  source 1..54: mol_type = genomic DNA
ggaattatcgtagctgatccatcaacaatggttactttaggatcattgttctct

SEQ ID NO: 76229 - DNA, 120 bp, Methanobrevibacter gottschalkii
  source 1..120: mol_type = genomic DNA
gcaggatttggtgttggagacatagctatgccttcagttccaactgaatttgtatctacaacaattgatacatctgtatttggtgcatttgcatctggatttagccagttattcacaaat

SEQ ID NO: 76230 - DNA, 3144 bp, Methanobrevibacter gottschalkii
  source 1..3144: mol_type = genomic DNA
aaagaaatatatgtgtcatctgatggttcagatgatttaaatggtacagatttaaataatccttgtagttttcataaggcaattaatatttctgaagatggtgattctattaaaatgaaggcaggtaattattccatatctgaggaagttgataaatctttaaatattagtgcatatagtgatgatgttgttaatataaagaataaattttcttatgtgtttaaggttaaaaacaacaatagcctagttttaaattctttaaattttaaaaattttaacacagctattgaatcatattcatatccaaatataatgattaaaaattgtttatttgaaaaaagtagctatatgtgtctaaatatgcggggaggcactactattataacagactcaatatttagaaataatactggtagtcaaggtagtgcaataaactttcaaaatacgttatataaaaatagatcttatttacatataaataacactatttttgattcaaaccatggtacaaacttaggaggagttatatacatttctctttcaaatatgtatctttataataatactttcattaacaataaagccggttatactggtggagtaatctttaatgatgtatctaaagtttatgataatcgttctagatatataaataatggtgcactttattctggtggtgctatttatattagaggtgataaagatttaggttcgtattatggagatcatgtggaatttataaataattctgccccatataaaaatggtgattctggaggttatgggacttctggaggagcttttactgcagtagatggtggagaaatagttttaaagaattctgttcttgaaggaaataaagcaatgtcaagagggggtgcaatttggtcagatcaaaaagttagtattataaatactcttatttcaaataattctgcttataatgaaaccggtctaactgtgggtggtggattatattgtcctcttttaaaagtaaatataatcaattctacattttcaaacaatcatgccaaagaatatcctgatatttttaatgatataacatttccttcagtggatattgttgaaaatattaataatactgatggtaaaaaaattagtattaaaaatttaactaaaccagtatcatattgcttgcaacctggaattctaaatattgcttcatctccaataattgaaactggcacaaataaattacttggttctggaggctatttcaatgggaagcctattggtgaattattgaaaatttttatagttcaaaattatcaaagagttcttgataagaaaattagtgaaaatacctttaaaagcatgttgggttttatatcaagtggctgttcatcactaccttctccatttaatgattcttattatttatcacatagattaattaaagaaactttagatgaatatgaaaaaggcgttagatatccagatgtaaatgcaacaggtccaattaattggttaacaaaaaaatatttaacattcgatttttatcaattctcaaatgaagatcatcaagatttgattgtgttcacattcaatgaatcaaacacaactcttaatccaccaattaatgtaactaaaaaatcaaacactacaaatcctgattttaatactgttgtatcttatgttataactgtaaaaaacactaataaaacatcaatggtttttgatgctttagttattgatactttaagtgaaggattagtttataatggtgcttcccataatggagtatataacaatacaactaatacagttacttggattctcaatattcctgctgatagtgaaattaacctttttgttaatgcaacagtggaaaaatttggcaagcttaacaatacagttaatgtttttaataaaactgcaaatgttactgttaatgttccaaatactgatgtaacaaaagctgtgaatgttacaagacctagtttcaatgatacgatttgttatactattacagtttttaatcgtaatcctaatgttgatttaatgaatcttgtagttagggatgttttagatgatggtttagttttcaatggagcttccagtggtggtgtttttgatcctatttctcgcactattatttggactataaacattactaaaggtggtcaagctgttatttatgttaatgtcactgttaataaatatggcatgttagttaacaaagtttttgttgataataaaactgccaattctactgtttatgttccaatagaacctcctgttaacccggatatgactgttgtgaaactttctttgaataggactgtttatgttggtaatcagactgtctttactattgttgtccgtaatactggtgattgtgatttaggtgaggtttttgttgttgaaaaagctccagaaggtcttgcttacagttcatttaaaggcactgactggtcatacagcaatggcaaatttacttatggtaaggttttaaaagtcaatgagtctgctggctttgagattgtattcgatgctgttagtcctggtaattggactaatgttgttgttgcaggttcaaatttaacagataataaaactggtaataatactactaaggtttataagccggatatggctgttgagaagctttctttgaataggactgtttatgttggtaatcagactgtatttactattgttgtccgtaatactggtgattgtgatttaggtgatgtctttgttgttgaaaaagctccaatgggacttgtttacaactcatttaaaggcaccgactggtcatacagcaatggcaaatttacttatggtaaggttttaaaagtcaatgagtctgctagctttgatatagtatttgatacaatcagtcctggtaattggactaatgttgttgttgcaggttccaatgtaaccgataacaaaacaggaaataatactactaaagtctataaacctcctgttaatccccctgttaaacctccagttaaccctccggttaatccacataaaatagaaaaaccagataatgaaaaagacaagattattaaaaaagattcttcaattaatataagaaaaacaggtaattcaatattcttaatgatgttatctgttattatttcaattccgttaataagaagaaatcaaaaa

SEQ ID NO: 76231 - DNA, 507 bp, Methanobrevibacter gottschalkii
  source 1..507: mol_type = genomic DNA
ttcattggatcctctaatgtgacattaatggcaggagatagttgtataacacttccttcggattatatgttagataataaagggattgcctataaaaatgatattggaatattttttatttcagtatcaggtaatagtccaaaagatcaaaaagaactatttgatgccatcaaatctaatggaaaatcatcaggatataaaaatgtcactaaagacaaagttaatggatttaaactttatgaatacgaagcaaatcctgataaacttaagaatgtatcatcggatagaaaaataagtggtagttatgaaacttggaaaacctatagtccgtatactccttatgaagatgtaagtgatatggatgtgactaaattcagatatatcgcttatgtaaatgaaaatacggatgatataagtgaattgtatatatttacaaataatacaaatgtcgatttatattctggagaaataacaaaaattattgatagtattgcagttgtagaggag

SEQ ID NO: 76232 - DNA, 156 bp, Methanobrevibacter gottschalkii
  source 1..156: mol_type = genomic DNA
ggttatttcggtttgtcagataatgctcttgagtctgattctagtttaaatgaatcacatgatgatgtagtttatctctggatgttggatgataatgataatctgaagttgattccaacgactgaaacttattctgaagggtctggaagtaattcg

SEQ ID NO: 76233 - DNA, 957 bp, Methanobrevibacter gottschalkii
  source 1..957: mol_type = genomic DNA
tatgaaaattatgatgattttgtttttaataatattacaatagatgattcaggtcatgatgatactaagttaattgatgaaaaatcattttattattatgaagaggattctggttatctttctgataatattgttggtggaaagaatattaagaatactacaggagtagtgatggctgatgatgagtatagttgtggtgcagcatcttttgcaacagttttaaacaacttagggaataatattacattatatgaagctaaaatcgcaactaatactactttaaatggaacgacaatgaaaggaataattgatgcaactaaaaaatatgatttaatgggagttggtgttaaattagaaacagttcagcttaaagaaaattatattgtgaatatgaatattttgggtattactcattggtctgtagtgaaagaaattaatgaggagtttattattttagcagattctaatttgggtaattataaatttgatataatggaatttaatcaatattatactaatcaaacaatagttatacttaataaacaacaatataataatcatatttctattgtatcaaataatactaattatatttctaatattgatcaaaaatatatttcgggtaatggatatgcattttatgtatctaaatctatgtcatatattaatgcaaaccctaaaggttatgcatttaaatatacaattatagtaccaaaatggggaggaaaagtagttaaactatctacaaaaaaattaacaaaacatagaataacagtaaaagtgatatataagataaaagtttattctaaatcacattttaaaggaaaagtagagactattcatcagccagctatttttaatttagctcataaagcgggaacaaaattttctgtctcaagacctacatccttcccaatacaatcaataaaatatactgtttcatattctcacttccca

SEQ ID NO: 76234 - DNA, 66 bp, Methanobrevibacter gottschalkii
  source 1..66: mol_type = genomic DNA
ttatcacattatgctgtaatggcaccggaaacaacagtatttacacagcaggcaatgcttgatgct

SEQ ID NO: 76235 - DNA, 123 bp, Methanobrevibacter gottschalkii
  source 1..123: mol_type = genomic DNA
ggaccatcacttgatatagcaaacttcttcatagaaagtataggcgcatacatgaatgactttatccggatgagttttagaacggcagcatcaggtacagtagctcagcagggatgggtacaa

SEQ ID NO: 76236 - DNA, 87 bp, Methanobrevibacter gottschalkii
  source 1..87: mol_type = genomic DNA
gctatgaatgggacaacacctggaagtcccatcatcaagatgccaatatctaatatgctgtttggaatattcaaccaatatccactg

SEQ ID NO: 76237 - DNA, 48 bp, Methanobrevibacter gottschalkii
  source 1..48: mol_type = genomic DNA
gtggggttgttgaatgagtttgtttataataaaattataattaatccc

SEQ ID NO: 76238 - DNA, 429 bp, Methanobrevibacter gottschalkii
  source 1..429: mol_type = genomic DNA
ttttttagtggtggtgattcagtaaatgtaactgatgttggcatgactgtaaattataattacaaaactaatgtggcttttacaattataccaactgatacaataactgaagttaataatgttcagctaaagaacattgaagttacttaccataatggtaaaacacaacatttagaagatgttacatttaactccaaaaatacttatgttaaagataatgaatatgggtttaaatttgattatacaatctctgatgattgtattgatggtttagatgaatatgattttggacatgcaacacaccatattaaaggagatattgtaataaacactgtcggtggaaatgaaaaagtggttggacatattgattatgatgtccctgcttcggctacagtatataaatactcttctggaagtggttcagtaata

SEQ ID NO: 76239 - DNA, 405 bp, Methanobrevibacter gottschalkii
  source 1..405: mol_type = genomic DNA
gttgaaacaacaactcacgatttcgatggtttgtttaacatgagtgttccctctgatgaggaatttgtaactcttgactctaatatcacaggtgcttctgtatttggatataattttaattatggagacccaattggtgataatataatagtttattactttaatgaatccattgttgatgataatgatactaatataactgaatatgtaattaatattttagatgaaaattctacttttaaacatccttctgttgaagatggtttcactgtattatataatcagatggttcaacatgatggaggttatatgttaattgcatcaaatgataatgaaactgaagtagtaggtattgttggggataatttagatgatttaaaaacatatgctaattctatagaattt

SEQ ID NO: 76240 - DNA, 270 bp, Methanobrevibacter gottschalkii
  source 1..270: mol_type = genomic DNA
gcatcagaaaacattgatgattcaaaatttagtgaagaatctgatttggatgaagttgattctgatttggatgaagttgattctgatttggatgaagttgattctgatttggatgatttaaatgatgattctgatttggatgatttaaatgatgattctgatttggatgagtttgatgatgattctgatttggatgagtttgatgatgattctgatttggatgagtttgatgatgattctgatttggatgagtttgatgatgattctgat

SEQ ID NO: 76241 - DNA, 255 bp, Methanobrevibacter gottschalkii
  source 1..255: mol_type = genomic DNA
tacaaccagaggagcagtagctattcatccggccatgattatatcttcctggataatttagccagcagttcttactccaattatttcagaagtgatttgaaaaacctgaagatcaaaacttccaatggtactgaatgtcaggtagtatacattccatcttatggatcacaaggcgcagcaatacttgcaagggtttctgttggtcagatttcacaaaacacaaagctactcttggacgttcatgatacaggaaca

SEQ ID NO: 76242 - DNA, 48 bp, Methanobrevibacter gottschalkii
  source 1..48: mol_type = genomic DNA
aatgatacatactcacaatttttcatgaactactccggtttatcatca

SEQ ID NO: 76243 - DNA, 36 bp, Methanobrevibacter gottschalkii
  source 1..36: mol_type = genomic DNA
aatgtttttgttaatgataatgcaacatatcacggt

SEQ ID NO: 76244 - DNA, 66 bp, Methanobrevibacter gottschalkii
  source 1..66: mol_type = genomic DNA
atgatgcaaattgatggaactctctcacctgatgagtctaatgtaaaggctactgtcaactattgg

SEQ ID NO: 76245 - DNA, 48 bp, Methanobrevibacter gottschalkii
  source 1..48: mol_type = genomic DNA
gccagttcatttgatgcttacaatcagggaagtgatgaagagggaaac

SEQ ID NO: 76246 - DNA, 33 bp, Methanobrevibacter gottschalkii
  source 1..33: mol_type = genomic DNA
atgtatcgggaatctcagaactgtattgatctt

SEQ ID NO: 76247 - DNA, 117 bp, Methanobrevibacter gottschalkii
  source 1..117: mol_type = genomic DNA
agttttgaacaggatgagataactcacgttgttaatatgatcgtgccttcagagtcaaacatcatggcccaggcaaattatgtaaaggatgcagacggtgtcacctattgtgagctt

SEQ ID NO: 76248 - DNA, 33 bp, Methanobrevibacter gottschalkii
  source 1..33: mol_type = genomic DNA
tactggaacggcactagatatgttgatagtggc

SEQ ID NO: 76249 - DNA, 171 bp, Methanobrevibacter gottschalkii
  source 1..171: mol_type = genomic DNA
ctcgatgaagctatcaaaaaaggtttgcttggagaagcaaaagacattgctcccggtgcatcattgcaagaattgaacatcagaaaacctgtaaccgacacaatcagtattgatactgttggtggagtcttgaatgtcaataaggatgttttcgactcagatatcgtttca

SEQ ID NO: 76250 - DNA, 240 bp, Methanobrevibacter gottschalkii
  source 1..240: mol_type = genomic DNA
gctaaccgtattgaatacaacatttacgatacattaataagctcaccgaacgttccacaatataacacaactcaaacagatgatacaatggatgctttcggtaactttgtcatcaaagcacaggaagcattcaaaggcaatgctggagctggagcagatttaacaataatggcagagtcttacaaaacattatcatacgttaaacagttggcttactcctcaaacaaattggttcagcct

SEQ ID NO: 76251 - DNA, 51 bp, Methanobrevibacter gottschalkii
  source 1..51: mol_type = genomic DNA
acacaggctgacggcggatctctaataggtgaaaaacagtacattggtttc

SEQ ID NO: 76252 - DNA, 60 bp, Methanobrevibacter gottschalkii
  source 1..60: mol_type = genomic DNA
agtaaagtcggaatattgctgaataaaccaggacttgccctgaaaggtacttgcaggcca

SEQ ID NO: 76253 - DNA, 144 bp, Methanobrevibacter gottschalkii
  source 1..144: mol_type = genomic DNA
cttggtgaagccaaagacattgctcctggcgctactttacaggaactgaacgtcagaaaaccaatcagtgaaactatcagtatcgacactatcggtggagttttaaacgtttccgctcaaatgcttgattccaatttaatctcc

SEQ ID NO: 76254 - DNA, 138 bp, Methanobrevibacter gottschalkii
  source 1..138: mol_type = genomic DNA
agaagcattgaaaaggcagccattgacatgattatgaattcatctaaagtagctacctacaacttcgaaagtggcgatgacactggtatgaccatcctcaaagctcaggagaaattcaaggaatcagcaggtagctat

SEQ ID NO: 76255 - DNA, 63 bp, Methanobrevibacter gottschalkii
  source 1..63: mol_type = genomic DNA
gtaagctacaaatctttgacaaccctgaaatcagacatattctcaagcaacagacaggtcgaa

SEQ ID NO: 76256 - DNA, 42 bp, Methanobrevibacter gottschalkii
  source 1..42: mol_type = genomic DNA
tccgagatgggtgacaagacctatatcggtatggactacatc

SEQ ID NO: 76257 - DNA, 57 bp, Methanobrevibacter gottschalkii
  source 1..57: mol_type = genomic DNA
aattccatagcatactggctactccaaaataaaaagaagtataagaaacgtgaccat

SEQ ID NO: 76258 - DNA, 36 bp, Methanobrevibacter gottschalkii
  source 1..36: mol_type = genomic DNA
tgtagcgatatagaaaagaaagcgaagaaattagga

SEQ ID NO: 76259 - DNA, 42 bp, Methanobrevibacter gottschalkii
  source 1..42: mol_type = genomic DNA
gaatatgtagatatggccataaggacagaagcatatatcaga

SEQ ID NO: 76260 - DNA, 39 bp, Methanobrevibacter gottschalkii
  source 1..39: mol_type = genomic DNA
gcattagctattatatcaaagatgaaattatatagtaaa

SEQ ID NO: 76261 - DNA, 48 bp, Methanobrevibacter gottschalkii
  source 1..48: mol_type = genomic DNA
caaaaaacagacaagaaaacaatcaatgatgctagtctgggtaaaggt

SEQ ID NO: 76262 - DNA, 54 bp, Methanobrevibacter gottschalkii
  source 1..54: mol_type = genomic DNA
caagtatattatcgtatagcgaaatcattaggatatgatgtacaatttgtccat

SEQ ID NO: 76263 - DNA, 57 bp, Methanobrevibacter gottschalkii
  source 1..57: mol_type = genomic DNA
accacttcaggaaatgttaaatcaatctggtgtgaagatggttacctcatagcatat

SEQ ID NO: 76264 - DNA, 48 bp, Methanobrevibacter gottschalkii
  source 1..48: mol_type = genomic DNA
aatgcacttttagttgtagctccagactttgctaaagcacagaatttg

SEQ ID NO: 76265 - DNA, 36 bp, Methanobrevibacter gottschalkii
  source 1..36: mol_type = genomic DNA
aatcctttaatgggtggggaaataatcagtcctgat

SEQ ID NO: 76266 - DNA, 81 bp, Methanobrevibacter gottschalkii
  source 1..81: mol_type = genomic DNA
ttaagggattatttcattggatctatacgtaattcaatgggtaatgattatgtgaatgtgattgcaccatttttaaattat

SEQ ID NO: 76267 - DNA, 648 bp, Methanobrevibacter gottschalkii
  source 1..648: mol_type = genomic DNA
ggggaatcagtcgggcttgaagtaaatgtaaataattactataatgatactaatttagctgatggttggatttattcacctaatttggatatgaattttattgatgatgtgaataatttaactccaacgactcaaagtgagagacaactggttttagattcgattgcggatttttcaaataatcctgagattaaactgcattttatcgagaacaatactatatctaaattttatttgatggatggtgaaccattgaatatcagtgatgaagatggggtgtggcttgataaaagttttgcagatgctaaaaatttgaaagtgggcgacaatattacttttgagtttaacggatttaaaatcaaaaaagaaattaagggaatcggatattcgccggaatatgtatatcatgcatcaacttcatcagtaatacctgattttaacaaaattggttttgcttacatgtcttataaagcatttcctacagataatattccatataacgttttaaatgtaaaatttaccggatctcctgaggaatataataatttattgtctgataaacttgatggggagtataattcatttgttgaacagtctgaacattcaagtgtttctcaattttcagaagaaattaatcagcataaaatg

SEQ ID NO: 76268 - DNA, 69 bp, Methanobrevibacter gottschalkii
  source 1..69: mol_type = genomic DNA
cctcagctattttatccatcaatgagttcaacttacaaattaccttcatggaatcccgcatggagtatg

SEQ ID NO: 76269 - DNA, 564 bp, Methanobrevibacter gottschalkii
  source 1..564: mol_type = genomic DNA
atgtatgatggaatgaatgatttaaaggaatgggaatttaatcagataaatcattatgattcaaaattagtcattgataatgacgcatccttatccgaaattgatgatgttgcccgtgatgttgatggggataaaataatggaatcagctattgaaattgaatcggattcggctaaaaagtcagggtctctgatagctttaaaccacacggatttgataacaccaacagattatgattggaataaaatggaaataggagatgatgaagtttctatttcacaaaaaatggctgacatgttggatatcagtgttggggatactgtaaaatggcatattattggttcggataaatggattaagacaaaaattgataagattcatgcagatccgacatcacagggaattgtaatgtcttctgataaactagaaaatcttgatttaaattacactcccacaagcattgttactgaacagcatgttgataagaattattctattattaaaacagttaactcaatgaaggatataacttctagctgggatgaattaacagaatcaatgtgg

SEQ ID NO: 76270 - DNA, 54 bp, Methanobrevibacter gottschalkii
  source 1..54: mol_type = genomic DNA
aagatgatgtgggattcttcaggagattcattttacatattgccttcaatatct

SEQ ID NO: 76271 - DNA, 630 bp, Methanobrevibacter gottschalkii
  source 1..630: mol_type = genomic DNA
gaatattatggattggaacagacaagtgcggatttttataatgaaactaatctggctgatggttggatttataaaaccagttttgataatgcagatttggataaaataaataatctggcaatgcaaacagaaagacaacatgtaatttcatctgttggggaatttgataatgatcctgacattacactgcattttgttgaaaacaatacaatttctaaatttcatgttttccaaggaaaagattttgatattaatgatgagtccggtgtctggttggataagcgttttgctgattcaaaagagttaaatgtcggagacaatattacttttaaatttgatgggaaaactattgaaaaagagattaaaggtattggatattctcccgagtatgtttacgagtcatcggctacttcaattactccaaattttgaggatgttggtttcgcatatttgtcatataagtcatatccagataatgttgaatttaatcgtttactggttaaatataatcagtcagatgattcttttaaagaaaagcttgatgattcaattagctatttgtcatttacaaaacaggaagaccatgttagtgtggcacaatttagtgaggaaatggcgcaacataaaatg

SEQ ID NO: 76272 - DNA, 69 bp, Methanobrevibacter gottschalkii
  source 1..69: mol_type = genomic DNA
ccaaagatgttttatccatcaatgactactcgttatactttaccttcatggaatcccggttttgatatg

SEQ ID NO: 76273 - DNA, 567 bp, Methanobrevibacter gottschalkii
  source 1..567: mol_type = genomic DNA
atgaatgacagtatggatgatttgaaaacttgggaatatgatgacattaatcattttgagtcaaaattagtgatttctaataatgcatctcaggaagaattgtattatgtaattaatggaactaatggcagttttataatgcagatgcctattgaaattaaatcgaacaatcatgaaaacacgggtgtacttttagtttcaaacaataccgacttgatatcttacacggatagtaataaaaatccaattgaaattaaggaaggggatatttcaatttcaacaaaattggctcaggattttaatttaagtattggtgataaaattaaatggcatattgttggaaatgatgactgggttaaatcagaaattggtcaaattcatgcagaacctatttcacaaggtttaataatgtctcccgatactttagaagatgaaggtttaaattttacaccaaccagtattctaacttcagaaaaattcggtgaaaatatcaattcaattaaatctgtatctactcttgaagacatggaggaaagttggagtgagatgacttcttctgttatgatg

SEQ ID NO: 76274 - DNA, 54 bp, Methanobrevibacter gottschalkii
  source 1..54: mol_type = genomic DNA
acattgatgatggatgctgcaggggaatctttgtattatgttcctatgttgact

SEQ ID NO: 76275 - DNA, 636 bp, Methanobrevibacter gottschalkii
  source 1..636: mol_type = genomic DNA
ttatttatgacacctgacttatctcatgaaactaagaatatattagtattagcatctgataaagaagaacagccaaacggtggagtagatatggcattcatgatccgtttagaaaacggttcacttaaaaactatacaccaatatatcctggtggaatgacacaccctacaaaatcagcacctggaggccttcaaggaccaatgatgcttcacgactgtctatggaatggactgggtgaaggtatgcaaaatgcaaaggaaattgtagaagttcgtacaggaatgcatgctgatgcagtagttgttgtttatgataaaggtattgacagcattattgattcaatcagaccacttaaaataaatggtactgaaacaaaccttagtgcaacagacatcattcgtcaaaacgatgcatataatggatatccaggaaatgaacatgttcaaggaacaatgtctagatccgatgcggtaatggtattggctaaagcacttgctaatacagctaaagatcctgttaaaaaaagtacaatggttcaaacagcactaaaagaatattccaatggaaatatcataatggaaccacaaggatcatttacaaaattacttgcaactaaaggatttgaaagcataact

SEQ ID NO: 76276 - DNA, 33 bp, Methanobrevibacter gottschalkii
  source 1..33: mol_type = genomic DNA
gtttctggtcttggtgctgatgcacttgcaggt

SEQ ID NO: 76277 - DNA, 51 bp, Methanobrevibacter gottschalkii
  source 1..51: mol_type = genomic DNA
atattaaatgcgatgggtgcgggtcaaactattggttatgctactgattat

SEQ ID NO: 76278 - DNA, 36 bp, Methanobrevibacter gottschalkii
  source 1..36: mol_type = genomic DNA
acatttgtcggttcaactgattcggttgcagtctat

SEQ ID NO: 76279 - DNA, 69 bp, Methanobrevibacter gottschalkii
  source 1..69: mol_type = genomic DNA
ggagatatttcctcagtatttgcttcttccggaagtagtgtaagaatagctgcagagcttacaggtttc

SEQ ID NO: 76280 - DNA, 114 bp, Methanobrevibacter gottschalkii
  source 1..114: mol_type = genomic DNA
attaattctacagacataacaactaattttagtgcaatgaatttacctccttcatttgaacatttatttggtactgattggttaggtagagatatgtttatacgtactttgaaa

SEQ ID NO: 76281 - DNA, 90 bp, Methanobrevibacter gottschalkii
  source 1..90: mol_type = genomic DNA
acattcctcggtttcggattagcacctcatgaacctgcaattggtattatcctatctgaatcaatgaaatatcttgcaacaggtaactgg

SEQ ID NO: 76282 - DNA, 204 bp, Methanobrevibacter gottschalkii
  source 1..204: mol_type = genomic DNA
atgtcccctataaatcccgtaaaaacatatattagtgctcttggatcagtttcttctgaaaaaatagctattttagaggcatattggggggtgaatgaacccataacaacaaaagtaattagttggttaggaaaaatagtgcaaggcgattttggaacatcattaattttcagaatgcctgttattgatgttattaaagaaaga

SEQ ID NO: 76283 - DNA, 87 bp, Methanobrevibacter gottschalkii
  source 1..87: mol_type = genomic DNA
gtatatcttggttggttcccaaccggattaggagtacccatcggaacattaagtgaaaatgtatctatttgggaatggttacacaga

SEQ ID NO: 76284 - DNA, 69 bp, Methanobrevibacter gottschalkii
  source 1..69: mol_type = genomic DNA
gaacaaatatttacatatcctggaattggacaagcagcagtatccgctggattaaaaagtgatgtgcct

SEQ ID NO: 76285 - DNA, 1557 bp, Methanobrevibacter gottschalkii
  source 1..1557: mol_type = genomic DNA
atgagtggaggaaataccagtacaagagcagataatgaattagtagtttctgcttttgtacatggcagtgaaccagaaacaggttacgacccgatgtatggttggggagaccgtggagaaccattaattcaatcaactttgatgaaaatgaatagaaatatgacctatgacaatgatttagctacaagttggtcttctaataataactttactgaatatactgtaaatatcagagatggagttaaatttactgacaacacaacattagatgctgaagatgtagcattttcatataatcaagcaaaaagtactggaaatacaattgatttaagtagtttagataatgtaagtgcaattaataaaaccactattaaattcaagttaaataaaccagattcaacatttacagacaaactgttacatgtaggtatcgtaccttcagattcatatgacaataatacttatggaagtaacccaataggatctggaccattcaaacttgcacaatgggataaaggtcaacaagtaatctttgagaaaaatccaaactattatggaaaacaaccaaaatttgataaattgacaatatcattccaaaaaaatgaagcttcatttaatgcagctaaaaatcatgaattagatattgcagcagtaccattatcttacgcaaatgaaacaatagatggttaccactcatttttatccgaatcaaatgatgtgagaggcatttcattaccaatgaaaaacaatactggtgaaactaatgaagatggcatagcattaggaaataatgtgactgcagataaatcaatcaggttagcattaaactatggtattaacagagaagacatatgtaaaggtgcattaaacggtgccggcgtacctaactacgatggtatcgctcatttcttaccatggtacaataatgattccactatcaaagatgcagatattgacaaagctaaagatttcttgaagaaaggtggatggaaagatacagatggtgatggaatagtagaaaaagatggtaagaaagcatcatttaacctatactactcatcagatgcaccggaaagacaagcaattgcagtagcagtttcagaacaagcaaaagaatttggtattgaaataaatgcaacaggttctaattgggatgaaatagataaaatcaaatttagtgaaccagttgtatggggattcggttctactgatccttatgtaatgtacggagaatactatagtaatcaagcaggtattggatacaacaacccatcacttgtaaataacagtgctgtagattcacatattgataaagcaatgtctgaaccacgtgaacaatcatatgctgactggtctgcagtttcatgggatggtcaaacaggcatttcaccaaaaggtgatgcagcatggttatggataagcgaaatcaaatacacatactttgtagatgatagtttagatatttccaaagatacattcaaattacaacctcatggtggagacttattcggaaacatctacgattggactcgtatatctccaattaatgctacaaat

SEQ ID NO: 76286 - DNA, 1545 bp, Methanobrevibacter gottschalkii
  source 1..1545: mol_type = genomic DNA
ggaggcccatctactgaacgagcagacaatgagcttatagtggcggcttacagtcatggtggagaaccagaagctggttttgatccaatacttggatggaactactactcagaacccttaatccagtccactttgttaaaaatgacaagaggaatggaatatgaaaatgatttagctaaaagctgggaagcaaatagtgattttacagaatatacagtaaaaatcagggacgatgttaaattcacagacaacactactttagatgcagaagatgtagcattcacatacaacgaagctaaaaaaagtggagcaagcttagatttaagtagtatggaaaatgcaactgcagtagacaaacaaactattaaatttgaattaaacagaccagattccactttcgtagataaatttgcatacattggtattgtgccatctgattcatacaacaatgaaacctatggtgcaaatccaataggatccggaccatttaaattcgtacaatgggacaaaggccaacaagtaatcttagagaaaaacccagattactatggaaaagagataaaattcgataaattaacaattttattcgaacaaaatgaagctgcattcaatgctgctaaaaataaagaagtagatatagctgcagtaccattgtcttatgcaaatgaaactgtagatggatacaatatgcacctcatggataccattgatgtaagaggactttcattaccagtacagaacaataccggtaaattaagcgaagatggaaatccaataggcaacaacattactgcagacaaatcaataagagaagctttaaattatggtgttaatagaaccgcaatatgtaaaggagcattaaatggtataggagtgccaaactacgatggtatcgctcatttattgccatgggcaaataatgaatctgcaattgatgatggtgatgttgataaagctaaagacatcttgaaaaaaggtggatggaaagatactgatggcgatggaatagtggaaaaagatggtaagaaagcatcaataaatgtatattactcatcaaatgcacctgaaagacaagctattgcagttactattgctgaagaagccaaagaatttggtattgaagttaatgcaactggttcaaactgggatgaaatggataaaattaaaaatactgacccagtcgtatggggattcggttcaactgacccgtcaacaatgtggtccgaatactacagtgaccaagcaactgtcggatataataatccagcacttattaacaatagtgctgtagataagcatattgataatgctatgaaatctgatcgtgaatcatcatatgcagaatggtctgctgtatcatgggatggtcaaactggtatttcacctaaaggtgatgcagcatggttatgggttggagaaattaaatacggatatttcgtagatgaaagtttagacatatccaacaataccgaacttatacaacctcacggaggagatatcttcggaaacatatatgattggtcacgcgtatcttcaattgaaaaa

SEQ ID NO: 76287 - DNA, 1536 bp, Methanobrevibacter gottschalkii
  source 1..1536: mol_type = genomic DNA
tctcatgacagtgatccaactcatttaactgtagctgcacacagtaatattaaagaacctgaggcggggtttaatccgcttactggttggggatgtggacaccaaaactataatccattagttcaaagttgtttatttaaaacggataaaaatggaagtattgttccagatcttgctactggttattcagtaagtggggatggtaaaacttggactgttaatgttagggatgatgttaaattttcagataactctacttttgatgcagaagatgtggcatttacatttaatacagcaaaacaaactgaatctgagttggatttaacaaatattgcaaatgttactgcagtaaataacacatgtgttaaatttaatttagttgaagctagatcaacctttatttatgatttgagatatcttggaattgtgccttctgattcatatgataattctacttatggagagaatcctattggtactggaccttatgtattggatcattgggataaaggtcaacaagctatatttaaaatcaatgataattattatggtgataaaccgtactttactcaaattaccttattattccctgaagaagctacatggttagaattagctaaatctggtgaaatagatgtagttcctgttgcaacttctgcattgaatcaaacagtagatggatatcaatttattgagaaatcagcaggcagagcacagggtgtatctttaccatatcttaatgatactggaattatgtataatggtactatgaaagttggtaacaatgtgactgcggataaatcaattagagaagctttaaatgttggtattaatcgtcaaactatgtgtgatgaaatttttgcaggacatgcttctcctgaatttactggtgttgatacaagaacttatgcaaatcctgatgctaaagtagctgatggggatgtatcaaaagcaaaacaaatcttgaaagatggtggctggactgatactgatggcgatggaattgtcgagaaaaatggtttgaaagcatcatttgacttatattatcctccagattatttggatagacaatcaatgtctactgtttttgccgaacaagcaaaagaattaggtattgaagttaaacttgtaggtgctgattgggatacaatttataaaaatctatatagttcagcagctttaatgcaacaaacttctccagatccatacaaatcaatttatcagcaatatcacagcaaagaaatggatggattctatatgaatcctaacttatataataattccgcttctgatagattaatggatgaagctatgcatactagtgatcttaaccaggctgattcattatggtctcaatctgcccttgttaatggtggaggttggggtcctgctggagacgctccatgggtatggattgctaattatgattataattacttcattaaagacggtattgatattggtaaacaaccagatggtttaggaaatgatgttttgattaatatatgtgattggtcaagaaccaattccacagct

SEQ ID NO: 76288 - DNA, 204 bp, Methanobrevibacter gottschalkii
  source 1..204: mol_type = genomic DNA
gatttatcccctatagatcctgtaaatgcgtatttaaaacaagctgcagtatcagaagctcaaagacaaatacttcaggagtattttggtacaaatgtcccattaacaactaaaatatttcattggttaattgatttatttcaaggtaatttaggcacttctttaatatatcgtgctccagttgtcgacattattttagaaaaa

SEQ ID NO: 76289 - DNA, 93 bp, Methanobrevibacter gottschalkii
  source 1..93: mol_type = genomic DNA
gcagtttatttgggatggtttccaattggatttggtgttccaattggtgttagaagtacagatgtaacatttgcagagtgggcaacaagattg

SEQ ID NO: 76290 - DNA, 72 bp, Methanobrevibacter gottschalkii
  source 1..72: mol_type = genomic DNA
gagcaagtattctcttatccgggtattggtcaaacagctgttgcagcaggtcttcaaaatgatgtgccatta

SEQ ID NO: 76291 - DNA, 114 bp, Methanobrevibacter gottschalkii
  source 1..114: mol_type = genomic DNA
tttataagagatattccaacaagttttattaatgcaaatcaaatgccttccttagaacatctctttggtaccgattggatgggtagggacatgtttcaaagaactattgcaggt

SEQ ID NO: 76292 - DNA, 90 bp, Methanobrevibacter gottschalkii
  source 1..90: mol_type = genomic DNA
acattccttggttttggtttgcctccacatgagccagctattggtgtaattttatctgaatcaatgaattatttatcctctggatattgg

SEQ ID NO: 76293 - DNA, 63 bp, Methanobrevibacter gottschalkii
  source 1..63: mol_type = genomic DNA
ccgcatatacttccagcttatggacaatacataataactccaatagtaacaaacattaacagt

SEQ ID NO: 76294 - DNA, 1203 bp, Methanobrevibacter gottschalkii
  source 1..1203: mol_type = genomic DNA
tctgagaatctatctacttcagataatcctgttgtagtggataatgtggatatgtcatctaaaaatattggaagtattcctgatgttacatctgcatcaaatgatgttgtagtttcagaaaattcttcggttgaatggaaatcttatgaaaatgagaaggatgataatgtatcagataatcaatctaattcatcaagtaactcaacttcaaatggtagttataaagaggagtctgttgtaagtaatgttgtaacaaagaatgtttcatccagttatgggactgttgtgaactataatattaaagttcttgatcagtttaaaaaaccaatggttggtaagaccgtttcagttaccattggtaaaaagactgttgagaaaataactgatagcgatggaatggttacattcacactcaattgtcaagcgggtaaatatgtaatcaaatataaagttgataatataaacggttctaattcatatattgttaagaataagatttcattaactgtcttaaattggaatcttaaaggtgatgtttctaaaattaatttaattaaaaagaacatgcctaataatacttgggttaaaaaagctgttgcagcaactaaaaaaggtattcctttattaaaatttaagggtggaaaaggaaagattgttttcatgactgctggtgttcatgggaatgaattatcctcccaagttgcagcaatgaaaatgattaaatatttgtctgataatccaattagtggaactgtttatataatgccgtttgtgaatgttaaagcaattgctaaaaaagtcagatatacagataaagattataatcgtatagcttctagttctggaactataccaaataaaattgttaaattggttgtaaaatataaatgtaattcttatggggatttccacactacaaaacctggtggagctcctgggaaagatattgtaatgggatctaagagtttaaaatcaaaaagtgcagaccttactaactatattgctaaaaaatgtaaagttaataagagaatatatagtcatattggccaagaatatcctggagcattgtttgaaaatgttaataagaaagggattacttcagttatctgtgaagttgcacttccacataatactgtaacaacaaaaacagtcaaaacatcttttaacatgatgaaatatctattaaaatataattcagttata

SEQ ID NO: 76295 - DNA, 660 bp, Methanobrevibacter gottschalkii
  source 1..660: mol_type = genomic DNA
gcttatgtgggaaccggtttttcacatgatattcccacatcaaaatatcatgatttatcagcttcagatattctgaataaatataacacgacaaattgtcatgtagaagaaaatggtgtctgcacaaaagttgttgatggagacaccatctatttagataacggtaagaaaatacgttttgttggagtaaacacccctgaaagaggagttgaaggttacattacttcaaaaaattttgttcaaaaattatgcttaaataaaaaagtaggtcttgatatcgatgattcaaaatttactgacagatatggaagaacattagcagttgttattgttgatggaaaaaatgttaatgaaatgctattaaaggaaggtcttgcagaaataatgtacatgcctcctagtgaattcaatccatttgagtggggaaccaccaatacacatgtagatacaacacacagttcatcttcaacaacacatacaagtacagaatccacaagctcttcagattctgcaaaatatattggcaatgcaaacactggaaaattccacactgctggttgtagtagtgttaatcatatgtccgagcacaataaagtatttttttcaagcagaactgatgcaataaatcaaggatatacaccatgtgaaatatgtaatcct

SEQ ID NO: 76296 - DNA, 381 bp, Methanobrevibacter gottschalkii
  source 1..381: mol_type = genomic DNA
gtttatgctaataatgattcttcaagtaattcaaataggactattttaaatgtgtcttctgaaggtccaattgagctttctaaaataactgatgatattaaaaacaattcctattatgagggatatgatgttgaaactttaagatggatggaatcattaggggataagtatgttttcaaatcaaatgatgaaattgtaattatggataagtgggatgcagacaaaattccttccgcttatgtttgtgatgcttatttccgggagatattttcatgcaatgttttggagaatcgtacattaggtgatggaaatcattttaaggatgttctatttattaagaatgttgaattcattgatgaggaagtgcattatattcaaatt

SEQ ID NO: 76297 - DNA, 36 bp, Methanobrevibacter gottschalkii
  source 1..36: mol_type = genomic DNA
aaattatttaatccatcaacaatcaccacaccagac

SEQ ID NO: 76298 - DNA, 2838 bp, Methanobrevibacter gottschalkii
  source 1..2838: mol_type = genomic DNA
gaatttaataatgcttcaaatacagaagattcaaatttaatgactgataatgttgattcattgtctgttgaaaataaattagaagtttctaacgaggattctatctcagaggctaatttagttaattctcatgatgataatttgaacaattattctgatagtgatgttttaagtaactatgaggatgattatggaaatgttcaagcttctaattatgctgaaataggtaatactaattctgttcgtagtgatgttttatctgtttctaatgatgataatttagctgctagttctaaagtatctgcaaaggttgatgtagttgatacacattattccaaatccgctacatatttcaaagttactttgaaagatactaaaggtaattctatcagcaatcaaaaaatttcttttaaagttaatggagtgacttacactgctactactgataaaaatggtattgcatcagttaaaactgcagctttgtctgtaggaacatatactgttgcaattaaatacgctggtagttccaaatatgcagctgtagctctttcaaagaaagttaaagtattgtcatctgttagtggaagtgatattactaaatattatggacctgttgtccagtattcagtaaaattctggaaaaattataatgcattagcaaatactaaagtatcatttaaagttaatgggataacttatactaaaaccactgataaaaatggagtcgctaaattaccagttaatttggctcctggaaaatatgttattactacaattaatccatattctggtgaaaaattgtctaataaatgtatttcattaagagatggtacaactttaacccatggttcaactaatacatatattactcctaataaaaaacattcatttactgtaactttaaaatctaaacacggtattttaattaaaaacaaaaatgtagtatttaaatataataataaaaaagtaactgttaagactaattcgaatgggaaagctactttgtctattcctgctctttctaaaggtacttattatattagttattcatattcaggagacaaatattattcaggttcatctggatctggaaaattgtatgtaaaaaatccaactactaaaattacatcttcaaaattgaagatgcaatataaggatggatctaaatttgcggttaagttaacaaaaaatggtaaagttttagctaataaaaaagtgaaattaacatttaatggaaaaacttatactgaaaaaactaattcaaagggtattgcttatttaactgtccctacagtaaaaccagctacttacaatattaaatatcagtatttaactccaagttattttaattattgttatggctcaaataaaattgttgtttctaaacaaactgctaaagtatcagcaggggatttagtgatgaactataaagatggttctgtttataaagttgttgtaaaaaataaatttggaaaccctcttaaaaatattaaagtcaaatttacaattaacggaaaaacttatactaaaactactgattcaaatggagtggctaagcagtctattggtttaaatattggttattattctgttaaaacagtactttctaataattattatgcacatggcgctatatataaacatatttcagttaaaggaactaaatttgtaggcggaaatattcatgtagcagtaggtaaaactgcatattattcagtaaaattattggattataagaataatccgattaaaagtacagaagttacttttattttggatggtaaaaaatacacagctacaactagttcaaaaggtgttgctaaagtaaatttaggtgttttatctgcaggtactcataatgttaaatattcacaaggagagtattcaggttcatctaacatatatgttgctgataaagtgactattaagcaaattattgctgcatctggaaatgtgcaaaagtatattcaaaaaaatcatagattaccttccacagttaatattgggggtgttacttattcaactaatcaatatttatatttagtttcaaaagctattgtaaatttaaaatctaatgttaaatctgcaatttatgttaaaaatgtcgatggtccaagtaatccttcatcaacatatgctgcaggtaatttatatgattatctttcagttgcaaatagtgttgtgaaaaattctgattcaaaaggtagtgtacctaatactgttagttctaaagttggaactattggttataaaagtttagtttatgcgtttgctcgtgttgttgcattttatggtgatgatgatagattgccatcatttgttgaaataaaatcactaagtggtactagttcagatagtaatattaactctaaaaatactatttcaaacttaaaagcatatttggcagcatcaactaattgccaggttaataatgctaaaattaaacaattagttggcaaattaactaatgggttgaagagtgaaaaatctaaagcaactgcaatttataattatgtgagagatacaatttcatatagtttctattatgatactaaacacggtgctgttggaacattgaatgctaaatctggaaattgtgttgatcattcccatttgcttgctgctatgtttagaactgcaggtcttgcaactagatatgtgcatgggtcatgtacattttctagtggaagtacatatgggcatgtttggactcaagtattgattgataatacttggactgttgctgatgcaacaagttctagaaactcgttaggaaaaatagctaattggaatactaagtcttataggcttaatggatactattccagtcttccattc

SEQ ID NO: 76299 - DNA, 84 bp, Methanobrevibacter gottschalkii
  source 1..84: mol_type = genomic DNA
tatatatcaaatataactgaaaaaacacagacaaatattcaaaatttgttaaaaacagaaagagatttcttaataaataaaata

SEQ ID NO: 76300 - DNA, 99 bp, Methanobrevibacter gottschalkii
  source 1..99: mol_type = genomic DNA
atatacagatcatatatggaaacaagtgatgtcagtttaaaagctaaagatgacataattgatgtaagaaataccatacttgacaacagaacccatgtt

SEQ ID NO: 76301 - DNA, 78 bp, Methanobrevibacter gottschalkii
  source 1..78: mol_type = genomic DNA
ccattatatgggttagctcctggagctattgattcatttgctcagttaagagcagttatggcaggaagtttcggttcc

SEQ ID NO: 76302 - DNA, 96 bp, Methanobrevibacter gottschalkii
  source 1..96: mol_type = genomic DNA
ggtactttcagtatcttgaatggttcagatggattattagcaggtattattcctaaatttatccaacttgctaccggcggtacttttgacttctca

SEQ ID NO: 76303 - DNA, 105 bp, Methanobrevibacter gottschalkii
  source 1..105: mol_type = genomic DNA
caaaaaattggtgttccaattctaggacatcttcaaaatggtaaagctgttgatggtattgcctggttattgtccacacctaacttaaccatgtttattacagaa

SEQ ID NO: 76304 - DNA, 84 bp, Methanobrevibacter gottschalkii
  source 1..84: mol_type = genomic DNA
atgtttgatattatgggaatgatctatggtgttttgaatactattttcgatccgattcttgctatggatccgaatccaagtaat

SEQ ID NO: 76305 - DNA, 123 bp, Methanobrevibacter gottschalkii
  source 1..123: mol_type = genomic DNA
tctgcaattcatgatttggtaattatattgcctactactgtatattgggttactttaactcctctttggcatgtaattggcagtatgttctatggtggtcaagctactattccatatgggatt

SEQ ID NO: 76306 - DNA, 666 bp, Methanobrevibacter gottschalkii
  source 1..666: mol_type = genomic DNA
gcagatgatgatagaagctattcaatagatcaagtgataacagatttaacagttaaaaataatggactactacatgtagaagaacagtatgattattcatttgatggagcttttaatggagtttatagggacatacctctaaaatccggagaaagcattgagaatattaaaattcatgttgatggtgcatatgccacatatgaagaaagtgatgatgatggatataaacatgtaaaaatttatttatattccgatgcagcccatactaaaggtataaaagattgtaatgtaaaagtctacattagctacgatttgattggtgcagtaactatttttaatgatgttagtggacttcaatacaaactttggggtgaagaatgggatgttggagctaacaatttaaaagcaacagtacatttacctggaaataatggaaatgaatattatttaaccccctccgagtacaatgatacttcatccttaaaaggaaacacaataactgcagaaagttcatacattccgaaaggcgaatattatgagttacttgttttaatgccagttgatgattttaataaatccccaaatgcaaaacatgtaaatcaaaatggtcatgacatgattatgaaaaacttaaaaaacaccattaacgaacgtgacttttggaat

SEQ ID NO: 76307 - DNA, 54 bp, Methanobrevibacter gottschalkii
  source 1..54: mol_type = genomic DNA
attgaaaataaaataagcattggacatccgaatattaaaggatttgaagcttca

SEQ ID NO: 76308 - DNA, 255 bp, Methanobrevibacter gottschalkii
  source 1..255: mol_type = genomic DNA
tcacaagaaaatattgaaagcaataccaaagacttaatgttaacattgaataacaaggcaggattgagtgcaagtgaacaaattgtatttgacactcttaaccacttttcaacaaataatattttaaatctttcaacacttaatggacaattatcttcagaaacaaatggtaaatggtttatggaaaaaattagagaatgggaatcatcagttgaaaatgatatggatgtatcaagattttttgatgacagaggt

SEQ ID NO: 76309 - DNA, 174 bp, Methanobrevibacter gottschalkii
  source 1..174: mol_type = genomic DNA
gtgccaaacatttcagattatgataatgatggattattcatgtatcattattacgggggatatggaatgatgaatatggcattttcaactggtgaaatttcagcaaacccatctgactctagtggattcggtggatctggaggaggatctggaggaggaggtggaggagcgttt

SEQ ID NO: 76310 - DNA, 327 bp, Methanobrevibacter gottschalkii
  source 1..327: mol_type = genomic DNA
tatattccaggccgtgaattagatttacctattgttaaaaatgcagaattaattgcaacaaaaattaaaaaaatactacaggttaatgaagatgatgacaccacagtcaatctcattaatggtggacaacagttattagttcaactcccatttgaaagattaaatgtagccgcagattacagtgtatctactttacaaacaagtgcagcaaccattcaatcaatcattgacagctttgaaattaatatgtttgatgcatcaaccattaaaactgcagtaatgggagcatacccaagaacagttgacctttcagggtcaaatattagt

SEQ ID NO: 76311 - DNA, 60 bp, Methanobrevibacter gottschalkii
  source 1..60: mol_type = genomic DNA
ttgggatatggtttaagaaacattatggcaaatcacgtagtggctattacaaataaacaa

SEQ ID NO: 76312 - DNA, 159 bp, Methanobrevibacter gottschalkii
  source 1..159: mol_type = genomic DNA
gcattatcttcaattatggagcaaactgcaatgtttgaaacaggtgatgctacaggagcttttgaaagaatgcatttattgactttagcttatcaaggattaaatgcaaataaccttgtatttgatatagttaaagaaaatggtaaaggaacagtaggt

SEQ ID NO: 76313 - DNA, 75 bp, Methanobrevibacter gottschalkii
  source 1..75: mol_type = genomic DNA
gcaattgaagataaaatcattaaagtagctaaaaaaatgccctcaggatataatatgtatgaacctattgattgg

SEQ ID NO: 76314 - DNA, 78 bp, Methanobrevibacter gottschalkii
  source 1..78: mol_type = genomic DNA
tcaacagtattatactataatgacatgttagaatatgaaactggacttccaggagtggattatggtagaacagaaggt

SEQ ID NO: 76315 - DNA, 87 bp, Methanobrevibacter gottschalkii
  source 1..87: mol_type = genomic DNA
tcacattcaatttatggtggtggaggacccggaactttccatggaaaccatgtggtaacaagacatgcaaaaggaactgcaatccca

SEQ ID NO: 76316 - DNA, 135 bp, Methanobrevibacter gottschalkii
  source 1..135: mol_type = genomic DNA
ttagatgcaggtactcaaatgttttcagttcaaaggacatcagcattaatcggaactgtttatggcaccatagacaatcttagaaatccaatccccaatgtagcaaaaattgcaggagaaattaaagataaactt

SEQ ID NO: 76317 - DNA, 870 bp, Methanobrevibacter gottschalkii
  source 1..870: mol_type = genomic DNA
ctactgggtggtggtagtgataatgtaactatagggtacttgccatctgaccatgatgcggctctttttgttgctgatgcacaagggcaatatgctaaaaatggaattaacactaaacttgttcaatttaacaatggcggggatttgatgactgctatggctagtggggaagttgatgttggttatgttggaatcactccagttttatcttcaattgaaaaaggagttcctgtaaaagttatttcagcagctcaaactgagggttccggaattgttgttgctaaaaactctggaattaattctgtatttgatttggagggtaaaaaaatagctacaccaggtgaagcatctattcaacacatgttgcttcaatattacttaaaacaaaatggtattgatattaaagatgttaaagtatctgcaatgaaagttccttcaatgaatgatgctttaaaaacaaataatatagatggtatgattacttttgagccatatgtatcaattgctgagaaaaacggtgcaaaagttttagttgattcctctgaaatactgccgaatcatccatgttgtgttgttgtggcttctgataaattccttgatgaacatcctaatgaaactcaaaagattttagatattcacaaaaatgcaactgattatataaataataacactgatgaagctgcagaattacttcctagtgatattgttagtgatgtggatgttgaaaaacaagcacttgcaggatttccattcatttctggtttaaatgatacttataaacagaatgtaatggaatttatgaatttggaagttgaattgggcgttttaaagaaaccactatctgaagataaaatattttggaacggtagt

SEQ ID NO: 76318 - DNA, 897 bp, Methanobrevibacter gottschalkii
  source 1..897: mol_type = genomic DNA
ggtcttttcgactttttaggtgggggagatgacactgtaaagataggttacttaccttctgatcacgatgcagcattatttgttgctgatgctaaaggtatgtataaagataataacattacaacagaacttgttcaattcaacaatggtggggatttgatgactgctatggctagtggggaagttgatgttggttatgttggaattactccagttttgtcttcaattgaaaaaaatgtccctgtaaaagttatttcttctgctcaaactgaaggttcaggtattgttgtaactgatgattctggaataaaatctcctgctgatttaaaaggaaaaactattgcaactcctggtgaagcttctattcaacatgctttacttgtttactacttaaatcaaagcgacttaactgttgatgatttaaatgtttctgcaatgaaagttccttctatgaatgatgctttaaaaaccggtcaaattgatggtattgttactttccaaccttatgtgtccattgctgcaaatcaaagtaatgctcacatattagaaaattcatctgaaatattgccaaaccatccatgttgtgttgttgtagcttctgatgattttatcaaaaaccatgaagatcaggcaaaaactattgtaaaaatccatgaaaatgcaactaaattcatcaatgataatgttaaagcaggcaacgcagataaaattgtaaaactcttacctgaagatattgtatctgatgcaaatttggaagctgattctttagctagtttcccatttatttctggtattgataatgatttcaaagcagatgtggatgaattccaagcactggaagtaagtattggtcttttaaataataccattcctcaggataaaatatactgggaagca

SEQ ID NO: 76319 - DNA, 2550 bp, Methanobrevibacter gottschalkii
  source 1..2550: mol_type = genomic DNA
gaaaattcgtcagctgatttgatttcagatactcaatatgagaatagtgttgatattgatgttgctgatgataatttaaagtcttatcaaagtgtatcttctgatttggaagataataatgaggtatataatcttaaattaaatgataattctcaagtggataatacatttttaaaagataatgcttctgtatctgattcaaagatatataaattaggttatgatgttacacatgttgcagataaattgcttaatttctcatctgctgatgacatattggtaattacaactgcaggtatggcttggattgataataaaactactgaaagtgcattaggcgggatagtcgatgcttcaaataattatgtaagttatggaaaaggcaatatattgacattatcttccacaaggaacgatcctactaatattgcattttttattaaaaaagacaattcattaaccatggcattttataaaaatggatctttaactccaattttccatggaaatgcaggtccaacattaagtgctggtgaatggaaaaaactacaaaaagcattaggtgatgaagatgcctattcatacattagtatagctaatgcatggtcagccggaatgcctaatgatgtgttaactcaagctacttatcatggacatgtttgcactggtcttataagtggtcaggctatgattcaaacattattaacttattatccaccaaaagatgaatttggattgcccttagagcatacagcatattatgtacttggagttccgggcggatctgaggatgatgcatttacatggtcattagacattactccaggaaaaagggcgtacataggtattgataccatggtaaataaagccatgactggatttatccgatggaatacaacttcaaatactggaattattattataatgagttataatgaaactgcaataaaagaaagctttaaaaaagtttctggtttaaatcctgatgcaagtgcaactaatgacttgaaataccaaaattggcttattagtaccttacatacaaacccaacatcacttgtcacaatactttatgaatttaaaggattaactaaagataatcttgaatatttgatgggattggaaattggtaagggtaatgtggttaaaagtgctcatggtttggatatgaattatattcttggattaaacttaactaaagcaaatcgtgaagctaatgttaatattgctgaaataaaattaagcgatgctaaattaaaacagataggtattgatgcttgtaacaatgcaattgaatattttagttcacaaggaattaccattagcaaagatttaaataatttatatgttttaacttctgcgggatatgttagaattaatggtactcctacttcaatggtatttgatggtatttacgaagtattaggttcagcactatacaaaaaaacattattcccagttcatacgcctatatggaaagatttagtgtttgatttttattgggtagatccaaataatgttacaaatgattcttcatttagtttgaagtatgatgttgctaaagatgaattaattgttataggcaacaccactagaaatgcaaattacattcttcaaaatgctataaaatatgaccctccatatgatgtattaattggatggttattccacaatcacgtatgtggtggaagtgcaccaggttatttaattgctgattatatatatgaaaacttccccactaatgaaaatgaatcatatatctacttaacaactaatgcgaattgtaaggatgatgtgatttcaagagttttaggtgtatcaccaggtatggggacatattataatttaagatatgataataataaaacaaactcaacaaatgtaggtattgcaattaaatggaatagcaaaaccaaaactggagaattaattattattaatcttgataattggggttcaggagcaatattcaaaaaaggatccaatatgtatgaggaatatattaaactatataaaaaagattattcctctccaaatttaatttcaagaccgcaaatttcaataacagcaagaaaagaaattaatgaagaaatgctgaacaaaattattggaggagcaacggatactaaagaaggaaattctattgcatatattatgaatcttccagacaaacttccaattaataatggagaaaacaacaacaaaaaagacaataaaaaaacaaaaataactggaaacaaaaagaaaacggatggaaagcatataaataatagcagttcatcttcaaattctattgattctaatagtcctacaactggaacttatggaaaatccaatgcaggtttatccgtcggaatttcaaaaaatattataaatgcaaatagtaattctgaaagttcagatgaaagttctggtgatggaaaaacttatgaaataagtaaaaaaagtcctaataaaaaaattaattcaaacaatgccatttttgcaattttagcagttcttgttttaggcggtattgttggatatggttacattagaaaaaatagaggt

SEQ ID NO: 76320 - DNA, 369 bp, Methanobrevibacter gottschalkii
  source 1..369: mol_type = genomic DNA
catccgggacatggtcactatgtagatgagattacatctgaagatgttggccatagtaaccacccttcaagtgattcacatgatagttccggtaaagaattatcatcaaaaagttcatcaaatagcagaattgcttcttctcatagtaattcgaaatcaaataaggtttcaagttcggatacctccaattcagatttatcaaataaacacacttcatcacaaagcattaaaagttcaaaaggtgatgtggaacctataaattctcaaaatgaggaaatgccaaataatactcaagttaaaaatacaagcaatattactaatcatacaataactgaagaagcggaaaatacaaacttgctgactcagtca

SEQ ID NO: 76321 - DNA, 36 bp, Methanobrevibacter gottschalkii
  source 1..36: mol_type = genomic DNA
cttccccaactagcaaatgaatttaatttaaataat

SEQ ID NO: 76322 - DNA, 54 bp, Methanobrevibacter gottschalkii
  source 1..54: mol_type = genomic DNA
ataatgggtaatgtaccaataattccagaatactttagtttattaacaaaaagt

SEQ ID NO: 76323 - DNA, 384 bp, Methanobrevibacter gottschalkii
  source 1..384: mol_type = genomic DNA
actgcaaatatattaattaatgacaatactccactagaaaatcaagcgggaaccttaaaaatcaacaataaaaccatacactatgaaaaatccggaaaatgtttagaagtaattgatggaaatacaataaaagtttatggcatcggtaaagttcagcttacacaagttggaagtccaagtagtgaagctaaagactttgttgaaaataattgccttggaaaaacagtatatctggatattgatgataaaaaagtagaagatgaatatggtcgtgcattagctattgtttatacagacactgttgatgtcaataaagaattaattaacaataacttatctgaaatatcttactttacaccaagtgaatttaaaaaaggagatatt

SEQ ID NO: 76324 - DNA, 60 bp, Methanobrevibacter gottschalkii
  source 1..60: mol_type = genomic DNA
tattatgggggcaatccaacatatctctggaaagtatttattggtgaaccctcaattact

SEQ ID NO: 76325 - DNA, 36 bp, Methanobrevibacter gottschalkii
  source 1..36: mol_type = genomic DNA
tacataaatagtactgctatccattctatttatcag

SEQ ID NO: 76326 - DNA, 93 bp, Methanobrevibacter gottschalkii
  source 1..93: mol_type = genomic DNA
agtttctttaaaggttggggagcagatccgaacacttactttgcaactactctcttacaatctagtgattccatgaatggattattcactttc

SEQ ID NO: 76327 - DNA, 72 bp, Methanobrevibacter gottschalkii
  source 1..72: mol_type = genomic DNA
acattgcctggatcttcaattggtcttgctgagctatttaatccggactggtcacttttaactcactttgaa

SEQ ID NO: 76328 - DNA, 111 bp, Methanobrevibacter gottschalkii
  source 1..111: mol_type = genomic DNA
ttaggttatatgtccctgcaatccggaactgcagttgcagaccttgtaactcaaggtactggtcttgtatttatagcatatccaactgtatttaatgtattgggtgattgg

SEQ ID NO: 76329 - DNA, 306 bp, Methanobrevibacter gottschalkii
  source 1..306: mol_type = genomic DNA
gctattgcatacacttctatgcatgatgacactagtgataacaacaataccactataaaatcttgcatcccgaatataacaaatgcaacaaatgatgctccaaatgcaacaggtgatgataaaaataccacttcatccgaaccttatgttgtaagtgaagttgttaaatttaatgcacagcaaggtgaaggatattaccgtgaagtaacatatagtgatggtaatttccgtcaatatgatgttgatactggtaaattaataggttcttcatatgattcggatcaagataaactcccaagcatggaa

SEQ ID NO: 76330 - DNA, 1821 bp, Methanobrevibacter gottschalkii
  source 1..1821: mol_type = genomic DNA
actgatacaaattctactgatgatgtaatttctagtgatgaggaggctgaacctccatcggttgtatctcaggacatatctataaatgaaggaaatgattcaaaccctcaggaaaattatactttgaagggcagcgatgtaagtatgtattataactcaggatctggttatgaagcatcattatctgatggaaatgattctgtggaaaatgcaactattaatttaaacattaatggtgtagattataataaaagcactgatgcatcaggtaaagtttttttaatcataaatttaaaaccgggcgattatgtaatcacagctagctacggtaatttaactacagaaaataagattaatgtattgccggttataactggaaatgatgtttcaacaacttataaacattcagtaccatattcagctacatttttaaaaagtgatggtagcccattatccaatacctatgtcaaatttaaattaaatggcaaaacatattccaagaaaacaaattctaaaggaatagctaaattatatgtcggttcaaaaatcggaacttataatatttatgcaatgcatcctaatggatacagcatttcaaataaaataactgtaaaaaattcaatcatatcaagcaatctgaaaaaacattataggagctcaaaaacttttaaagcaacattttatggtaaaaatggtaaattattaactggtaaaaccattaaattctacactaaaggatcttatttctataaaaaaactaattccaaaggtgtggcttatattaaagtaatttcaaaacctggaacctataagattacttcaattaacacaaataccggtgagaagaaatccaatacaattactgtgttatcaacactggaagcgaaatcaatgacagttttcaccggcaccacttcaaaatttaaagtgaaactttataaaggtgaaaacattgctaaaaacactaaaatgacagtttatgttgacggtgttaaaaaaagagtaactacaaactcaaatggtgttgcaaccgttaagttcaaattagataaagggatttataacatcaaatcggtagatccttttacaggctatgttttaaataaaaaagtaactgtaaaactggcttctatcagtgctattaatgtcaatgcaattgaaggcaaggaagggttattccctgccaagcttttacagcagaatggtaaggtagctagtggtacttatatggagatgactattgatggtgtaaaacataaagtcaaaactgattcaagaggtattgcaggttataagttcacatttaaggatgctggtgtgcatactgtagtttgtaaagatttatctacaggctataaggtaaccaaaaagattaatgttgtaaaaaagggtgaaggtaaatcttatgatcagtttggtgtttcagaagatggcaaaacaatgcttgtgattggcaggccatctgcttctggtgaaacagctaagtatggttatacatattataaaactgaagtggatagaacctgtccgatctgcgggagcaatgaactttactggagcatcttttgggcttccggtaatactgatggcggaactttcccagaaacacctagccgtccggcccattatgatgagggcaatttagatggcatcattatttgcatgcattacactggagatgatgagtattgtgatgccgactggtctgttttcgggcataatcatgatggtagcggtagggatttaaagcttgtatcaaaaccagtcagatcatcagaaatagaagcatatctgcttaaaagcggatattatgttaaagta

SEQ ID NO: 76331 - DNA, 45 bp, Methanobrevibacter gottschalkii
  source 1..45: mol_type = genomic DNA
atgattacacagttttcaactacttatgcaacaggactttataat

SEQ ID NO: 76332 - DNA, 45 bp, Methanobrevibacter gottschalkii
  source 1..45: mol_type = genomic DNA
tatcagattattgcaatttatggggcggaatatattgaagccggt

SEQ ID NO: 76333 - DNA, 441 bp, Methanobrevibacter gottschalkii
  source 1..441: mol_type = genomic DNA
gtaagcccggttctaatagttgctgaagatgcatctgaagacaatggtattgatatggctgcgactattggtttaactggttttaactggatttatcccggtaattctgttaacgctcaaggtcaaacattacataatgtttatgcagactatcctgataatccatatggtgctgcccgtgacataatgagttatacataccatgtcaccccacatatcataattagtattaacaatgatgcagctgcagccatattcggagaaaacatcatagatgatattcgtgcaaatgatggttataacggatatgcaggtaatgataaagtttcaggaagtatggatagaggagacgctgttggaactgcaatggcagaaaatggaattaatataattgaaattccaatacaatttttaatagggaacattagcccccactttgtc

SEQ ID NO: 76334 - DNA, 102 bp, Methanobrevibacter gottschalkii
  source 1..102: mol_type = genomic DNA
caatttgcatttgcagatttaagttttgcgggtttaataggaattccaaaaacattattcatggaaggaattggtgtaggttctctgacaggaactattcca

SEQ ID NO: 76335 - DNA, 42 bp, Methanobrevibacter gottschalkii
  source 1..42: mol_type = genomic DNA
tggggtggaggatggttaatgaacattggagccattgatttt

SEQ ID NO: 76336 - DNA, 51 bp, Methanobrevibacter gottschalkii
  source 1..51: mol_type = genomic DNA
gcagcaccatcaataaatggtgtggcaggtctattttatggaaatcctgaa

SEQ ID NO: 76337 - DNA, 57 bp, Methanobrevibacter gottschalkii
  source 1..57: mol_type = genomic DNA
ttagtatctcaaagtatcaatcctgctaatgtaggcattggtgttttgggaggtctt

SEQ ID NO: 76338 - DNA, 63 bp, Methanobrevibacter gottschalkii
  source 1..63: mol_type = genomic DNA
cttggggctcaggctgttacaatcggaggattgggtgcaacagctccgggtcttggtattgga

SEQ ID NO: 76339 - DNA, 36 bp, Methanobrevibacter gottschalkii
  source 1..36: mol_type = genomic DNA
tacaaatacatgttaaatgcccttcataattttcat

SEQ ID NO: 76340 - DNA, 42 bp, Methanobrevibacter gottschalkii
  source 1..42: mol_type = genomic DNA
aaattaattgcaacaatcattggtactggagatgcacttcct

SEQ ID NO: 76341 - DNA, 36 bp, Methanobrevibacter gottschalkii; identical to SEQ ID NO: 30885
  source 1..36: mol_type = genomic DNA

SEQ ID NO: 76342 - DNA, 126 bp, Methanobrevibacter gottschalkii
  source 1..126: mol_type = genomic DNA
tataatggtcatggggaagatgatggatactttggtggtgcagatgatgctgcaggcgaagctattgaggaatcaggttttgaaccttggttttcatcaatttgggaaccacctagtggtgaaata

SEQ ID NO: 76343 - DNA, 66 bp, Methanobrevibacter gottschalkii
  source 1..66: mol_type = genomic DNA
ggaaaaggagatgttatatatgaaacaggaatattgggtattgtagttactaccgattcgtggcac

SEQ ID NO: 76344 - DNA, 51 bp, Methanobrevibacter gottschalkii
  source 1..51: mol_type = genomic DNA
cctcatgcaagtactacatttgctaaattgtttggtataactcggggattg

SEQ ID NO: 76345 - DNA, 33 bp, Methanobrevibacter gottschalkii
  source 1..33: mol_type = genomic DNA
cctagattattcgctcctgaaagtgttgatgca

SEQ ID NO: 76346 - DNA, 339 bp, Methanobrevibacter gottschalkii
  source 1..339: mol_type = genomic DNA
atttataataatactcaaccttctcatgaagattctttaaatttaataacggataatggtactgttcataaaactgcttcttacccatataaagctgtaattgaatatgaaggtagttggggtgctaaaatgggtgatccaaattatctagtaagtgaagatggttatggcactaaatcatttgtactcgattgcgctgcttgggatagagtatctatttctgcacaaaaatatgattatggtgaaggggagttgcatgttaaattattaagaaatggcgaagttgtagctgaaaattcaactacaaatgttactggtgctgttgtagttaattataat

SEQ ID NO: 76347 - DNA, 786 bp, Methanobrevibacter gottschalkii
  source 1..786: mol_type = genomic DNA
acagattcaaatgtcgtaataacctatggggagactacctattcaaattcaaattacaaatcttttgttgacaatttttttgttaaccaggcaaatgttgatataaacaatgtaggtgttaaaacaatcactgctgatcaggtgaatcaagtatcaagcggaatcactggtaaatcatataattcaaatcaaatactgtcttcagcacttgttgatttaaatgataatggaaatttaaaggtaagtgttgataaatccaaaattactacaattaccggtgatatgtacatttcagctttaaaatctgctggaattacaagtgggcatgtgtatgtgacaagtcctgttcaggcaactggtgaatctgctcttgcaggaattatgaattcttatgaggaagtaactgatgttcaaattccagactctgtaaaagaagcagcaaatgatgaaatttacacccaagctgaaattgtaaataattcaggtgtaaatgctgatgatttatccaatctggtaaatcaggtaaaagatgaagtatcaggcggcaatgttactaaccatgatgaaattgtaaatattattaacagtcatgttgaaaacaataacattaacattacaaataatgatattgaaaacttagcagattcaattgaacaagtacagaacgtacaaggtgatgtaaactactacaaaactcaggtaaacgaatttctagacgataactccacaggaggtttttcattagatggtttatttgactggattaaatcctttactgatgggatt

SEQ ID NO: 76348 - DNA, 93 bp, Methanobrevibacter gottschalkii
  source 1..93: mol_type = genomic DNA
ggagtaatttcaattttaagttctattgctccatttggctcatcaaactcaatatctcaaacttcaacttcaagttacgctcagtctgttgat

SEQ ID NO: 76349 - DNA, 378 bp, Methanobrevibacter gottschalkii
  source 1..378: mol_type = genomic DNA
agcagtccagatcctatcaaattaggagacatcaaaaatgatgacttggtaattacagaagtcggtcagaataaactgaattttgaatattccgttgaagtagacatttctgatttatctagtgaggataaaaaattatttgaaaaagcattaaataataacaatacctcatttattcttaatttaacatcttcaacaccaacgaaaattgcaataactatgcatagtttacctaaaaaagctgaaattataggcaatacattatatattaaaaataacaatatgtttcgcttaattaatggtatacaactagataatttaaagatatctgcagtatctttcaatacaactagtggccaattatttattgctagaaaa

SEQ ID NO: 76350 - DNA, 354 bp, Methanobrevibacter gottschalkii
  source 1..354: mol_type = genomic DNA
gcattatatcagataaatgctgaaaattcagtaattgtaggtaatttaagccaaaatataacaaatgatggttatggatactataatggttatgtaactggagacattaaagtagattctagttttgattatttatgtgttaatgttaacttccttgacaacaacggaaaagtaattgattcaactataggttggaatgatttgaatcctcagagtggaaaaacatataaaatttctgcttggtatttcgaacaacaagcaccagaaaaagcagaaataagtgttgttgattctgcagattcaacaacaccattatatacagagaatataacaatttcaacatcaagtggagtt

SEQ ID NO: 76351 - DNA, 339 bp, Methanobrevibacter gottschalkii
  source 1..339: mol_type = genomic DNA
tgtgtttgtgcatctatgacaggacaaatatcaatcttgccaaatgataatgaatcagagagtatattggataatctttctgctattacaaatgatactggtaacagcggacaaagttacggttctaaagattatagttcatcaagttcaagtagttcttctaatgatgattcccaagtggagactacaactgaccattcaggtgataatcaaggggactcccagaaggattcagatgatcatgaccatgagaattctaatcaaaataataaagataaagatactaaaactgattctgggcatgcaggtcaaggctcaggagatgctaatgattttgat

SEQ ID NO: 76352 - DNA, 51 bp, Methanobrevibacter gottschalkii
  source 1..51: mol_type = genomic DNA
tcatgggctaatccccttgtgcagacacattcttatttctattttaatact

SEQ ID NO: 76353 - DNA, 51 bp, Methanobrevibacter gottschalkii
  source 1..51: mol_type = genomic DNA
gcaaaagattatgttgcaaatacaattccatttgtcccatttaggataagt

SEQ ID NO: 76354 - DNA, 63 bp, Methanobrevibacter gottschalkii
  source 1..63: mol_type = genomic DNA
ttctatcctaatgctgaaagtatggcacataagttatttggtttaatacaaatcaatgatttt

SEQ ID NO: 76355 - DNA, 42 bp, Methanobrevibacter gottschalkii
  source 1..42: mol_type = genomic DNA
atggtagaattaaaagatatagctcaagaaaatgaagtggat

SEQ ID NO: 76356 - DNA, 36 bp, Methanobrevibacter gottschalkii
  source 1..36: mol_type = genomic DNA
tctaatgcaaagattaggcaaagaagtgacgatact

SEQ ID NO: 76357 - DNA, 69 bp, Methanobrevibacter gottschalkii
  source 1..69: mol_type = genomic DNA
actttttcaattacaccggaacaaactttaaaatttgaagaatattttaataaatttgcaaatggtgaa

SEQ ID NO: 76358 - DNA, 42 bp, Methanobrevibacter gottschalkii
  source 1..42: mol_type = genomic DNA
gcacaaaaagctattgtagagcctgatgattcatattttgca

SEQ ID NO: 76359 - DNA, 39 bp, Methanobrevibacter gottschalkii
  source 1..39: mol_type = genomic DNA
ggtctttcaggagctatgttaggtgttgatgcaggtgga

SEQ ID NO: 76360 - DNA, 87 bp, Methanobrevibacter gottschalkii
  source 1..87: mol_type = genomic DNA
aaatttattgatgcagtaataaaatattctaaattatatccttctgcaagtaatgtgttccatttatcacaattgcctgccaatgat

SEQ ID NO: 76361 - DNA, 102 bp, Methanobrevibacter gottschalkii
  source 1..102: mol_type = genomic DNA
catcctatttttttattaggtgaacttatgaatattaatgttgaattattttatcttttcaatcatgcatttcaaaatccattttttgattatataatgccg

SEQ ID NO: 76362 - DNA, 87 bp, Methanobrevibacter gottschalkii
  source 1..87: mol_type = genomic DNA
attcatgaaccaagaccttttttaagtttagataatgtacatttattaattgctgaagatgatcctctttcatttccttcaggccat

SEQ ID NO: 76363 - DNA, 33 bp, Methanobrevibacter gottschalkii
  source 1..33: mol_type = genomic DNA
gttgcatcattaggtgaagctgcaatttcagga

SEQ ID NO: 76364 - DNA, 57 bp, Methanobrevibacter gottschalkii
  source 1..57: mol_type = genomic DNA
ttaatcgggattttatttggtcaaattgaagttgatgtttggcaaaatgccgataaa

SEQ ID NO: 76365 - DNA, 33 bp, Methanobrevibacter gottschalkii
  source 1..33: mol_type = genomic DNA
tcaacatttggaacaatggcaatagctgcaaac

SEQ ID NO: 76366 - DNA, 51 bp, Methanobrevibacter gottschalkii
  source 1..51: mol_type = genomic DNA
ttgaatatttataatttatcagctaagactgcagccatgacaagtgaaatg

SEQ ID NO: 76367 - DNA, 48 bp, Methanobrevibacter gottschalkii
  source 1..48: mol_type = genomic DNA
cttaatatcaactttttgaatatttttccacaattgtccgtatatcca

SEQ ID NO: 76368 - DNA, 36 bp, Methanobrevibacter gottschalkii
  source 1..36: mol_type = genomic DNA
atgatgttgatcattaaaaacatattcttggtgata

SEQ ID NO: 76369 - DNA, 339 bp, Methanobrevibacter gottschalkii
  source 1..339: mol_type = genomic DNA
cctctagctgaaaattcaattagaaatactcttgatgtttccgattctttaaatgtgaaatcagatttatcaaaaatagctaatgcaattaagcaagtttatggtgaaggtcaaggatcaagacaaacaattaaaattgaaagtaacaagaaacttaaaattaatatagcaaacagtcatgtttcaacaagttttaaacttaaaagtaattccaaaaaggatataaaagagcatgtaatgtcaaatattgggaaaacaaccatctcattaaataaaggtgaaaatgtgataattgtggaatggcctgttaattctaaaaatatgttaatttatacagta

SEQ ID NO: 76370 - DNA, 519 bp, Methanobrevibacter gottschalkii
  source 1..519: mol_type = genomic DNA
cttgatccgatttatgatgaattaccaaatgttgcaagtgttattgaaaagaatatgccaaataatgaagaaacattatatttggatttatcatcttcaattaatattgatgatttgaaaaataatttatctgcaactgatggatttatatcatttgatgaaaaatcggttaatattccaatgtggacatttaatgagagagaacataattactttgatgaaatagttggaaatattgattcgaattataaagcttataatataagtacatctgagattcaaataactcttgctgataattatacttctgctcaagctttaaaatctttttcagattggtataaattggtttatggtgaaactatttcttatgcgcaagttcatgcagtattggttgttgattcatcatctcttgatacgtttgagcatattttacttcaaaaaggtattgttgcttcaaaaatagaagggccgattcaggacacagtaaacaatacaaattcatcaatgttaactaac

SEQ ID NO: 76371 - DNA, 36 bp, Methanobrevibacter gottschalkii
  source 1..36: mol_type = genomic DNA
cttcaaaagaatttatacatcattggaaattataca

SEQ ID NO: 76372 - DNA, 636 bp, Methanobrevibacter gottschalkii
  source 1..636: mol_type = genomic DNA
atcgttagttccatgatgaacactccagataatgtttataatattacaaatgtagggcacaatgctaatggtactgtttataaaattgaagccggtaatatgtcctctaatgaaaccgttggacttattttaggagtccatccaagagaacatgaaattcacgaagcggtgaataatacaatttataatattacttccgaaaatggaactaataatcttactaaaaaatatgtaatatattatattaaaacaaaagataatttaacttcccgtgaagatacaaggcctgctggtgaagaattagctaacaaattcattgttccaaatattgttaaggataagccatttattgtattggatgttcatgaaataaacccagattatgaatattcaaattttatatttagtttatccaacagaaccaacacagttgactcctatatttcacatattgctaatgatgttaatttagtggattatcaatttagtgaaggaacaagccctgaaaaagttacaaaaccgattgcaagtaaaggagttactacattacttatggaaacttcaattactgatgcattaatggaaaaacaaaaaactgcagacaatttaattaaaagtttagatagtttagaaccg

SEQ ID NO: 76373 - DNA, 594 bp, Methanobrevibacter gottschalkii
  source 1..594: mol_type = genomic DNA
actggattcattggcggtaatgatgtcgaaactactccatttaaaatgagttttatggaaggtagttttataggtaatgtaagtcttgaaaatgataaagagaaattcatgcattcttatgaggataaagaaaataaaataacttataatatttccactgtggacaactcttcagtattaatggaaatatatcaaattcaaggtttgggtaatcctgaagtaagatcattcaatggcaatgaatggaatatttactttacacaggcagttccaaataataattcaagcactaattcttctaatggggatgatgcaatgaatattattattggagaatcacaaggtaaaaaacaaggttatttgatttatatgattattgatggcaaatctaaaatcaatgccaccggtaaaatgtatggcgaagcatatactaattattttgaacctttacttgaaagtttaactttgaaagaaagtaagaatgttccacatatttatgatgaatttggacttacaaaagaacagtttgattatcagattgatttgatacgtcagtataaatctggaaatacttctgcacttcagggagctcaa

SEQ ID NO: 76374 - DNA, 1101 bp, Methanobrevibacter gottschalkii
  source 1..1101: mol_type = genomic DNA
gcaactaacgcgccttataccgctcaatccgttgcagatgagtataatcttcctataggacaatccatgtttgaaaaccaatctattttaggtcaacaagattcaatttctgtaccattgatatcaaatgttggattcttacaacatcaaattactgcattagatattcaaggattattaatgactttgactactggtatggttccatttgatttttcaactgtatctagtgaaggtatagactcatatggggatgtggttaatgtagaaggcccaggatttttaacatttgaaggagataaattggctgtaaaatcaccaaataactatgtatgggggtacagtactccatataaatggttagttaaaactgatactggtgtggatgttgttgaaaatggaactgttgttaaatctgttccagaaaatgaaattaagaatttagattatcataatgattattataatagttctactattagaagttggtataactatgatgctcataatgggtctacatttactttagaaaaaggaatgaaaggattttctgatggcaggaataatattagtgctgctgatgtgccagtaatatttggtcatgatgttgttgattatgcatctgaatatcctactggttctcctattctgttatactctggaaattacactgaagaagatggtgaagcttatggaacttctttaggatcacatgcagaatatggtgattcaattagggaagtaaatgcaagacaatttgttgatgcctggaatggaactgtaattccacctaattcaacttcaagtggtaaagattatgtgtactttgaatcagctgttgatccaactgctcctggaggaagtgcagcgcatggtgtatgtccgcctgctagggctttaagagcagcagtcactgctgaaggtttcggtttacctgttggtatgacttgggacgaagatgcagttttatttgggtataatcctgcacaggatattacagttacaaataatcatgattatccagtattgattaaaatgtggactgaaggtgaaggtactggaatgggtatttactgtcaaattgtaagatatattccgaaa

SEQ ID NO: 76375 - DNA, 39 bp, Methanobrevibacter gottschalkii
  source 1..39: mol_type = genomic DNA
gtgttattttcaagtcaagcggaatttactcacccattt

SEQ ID NO: 76376 - DNA, 297 bp, Methanobrevibacter gottschalkii
  source 1..297: mol_type = genomic DNA
cgtgtatctggcatgacaattttctctccacttttaagattaggtagaattgaacaatactctttatcaagtattaaaatggtattaaacaacattcaattaatagggcataatgcaaatgcttcttattggggagcagatggaacagcatttgctgaaggatatattactttgccaatgcaattaattttattttttggattgcctttcccactattctttggtgtgcttgtaaaccaaaaagatacaattgattatatgcttccaggtatatttggatggggattcgactttgga

SEQ ID NO: 76377 - DNA, 33 bp, Methanobrevibacter gottschalkii
  source 1..33: mol_type = genomic DNA
tttcccactaatatggattatttaacatctccc

SEQ ID NO: 76378 - DNA, 60 bp, Methanobrevibacter gottschalkii
  source 1..60: mol_type = genomic DNA
tttataggttttacttatgataatttagttcaagcaagtgttcaagttggttttccatgg

SEQ ID NO: 76379 - DNA, 36 bp, Methanobrevibacter gottschalkii
  source 1..36: mol_type = genomic DNA
gcatttaattttagtcatgtattttacatagagtcc

SEQ ID NO: 76380 - DNA, 315 bp, Methanobrevibacter gottschalkii
  source 1..315: mol_type = genomic DNA
ttttattcctcatcacttattaactcaagtattaatattgaagattctgtatctcatagaatcattttaaatgatgtttcttgtgtaattagccaagttaattcaaatggtgttggttattcaaaatacattaaactgccatcggataaaggttattttgaaattactgttgataaatccaaactgacaatagaatatgataataagaaaggtgaaactatgcttcctcttttgaatatggattctaaatataaattaatcagcgggagaggatattatatttcaaaatctgatgatggaaaaattgtgataaca

SEQ ID NO: 76381 - DNA, 414 bp, Methanobrevibacter gottschalkii
  source 1..414: mol_type = genomic DNA
gtgtttatttcagatgaaaatgaactaaatattgcaatggcagcagcacacagcggtgttatagaagggcttgctacatcatcaagcggaatttatcctgcagatgcttacagtgattattcaaattctaaaatgaatgtattggaaccatattctgttgagatagttaatatttcatatactgagcttggaggagataataattatgataaaaaacaaatccagtttaaagtttatgcaaaaacatctgacagattcaataataaagaattaacttcaattggggataggataaattataacttaagaaaatccattgcagttagttttaattcaataaatgccaccaataaactttataatccagttttttcacctcattatgtttacacgaccgctaatgttaaatgggta

SEQ ID NO: 76382 - DNA, 2658 bp, Methanobrevibacter gottschalkii
  source 1..2658: mol_type = genomic DNA
gaaaattcgacagatattaatttagaactcaatcataacaatgatgaatgcattaaggaaatatctgatgaaagttcaacagatattgatttaaaaatcaattacgaatatggggatgaaatcaatccggaaatttccatatctcattgcaataataatatgaactatacaaaaaatataattcattcaaacaattacagaattaccatgaataaattgaatgacggagcagaatgttctgtttcagtttcagctctagggtacataactcagattcaaaatataaccataaattcccaatcaaacaaaactactatttttaatctaaaagctacggatatttacaaaatgggatatgatatgacaaaatctgcagatagattacttaatttttcatctgctgatgatgttctggttattaccactgctggaatgacaaggattaatgatattactacagaaaatgcattggatggaatttataatgctgctgatggccatataacttatggaaaaggtaatcttttaacattacatgccataagaacagatccaactaattttgcattttttattaaaaaaggaaacaggttgacaatggcattctatcaaaatgcttctacaactccagtatatactggaattggaggtgttggattaactacaaatcaatggaaaaaattaaaaggattaataggtgctgatgatgcttatacttatgtaagtattgctaatgcatggaatgctgggttatattcagatattctgactttagcttcgtatcatggacatgtatgtactggtttaattagtggtcaggctatggttactactttaattaaatattatccgccacgtggtgaaactggcgcccagcctcttgaaaatactgcttattatgtgttgggagttccgggtggttctgatgacgatgcatttacatggacacttgatattactcagggcaaaatgtcatacattgggtttgacactatggaaaataaaaatatgaatggtttcattagatggaattcctcatcaaatactggacttttaattataatgtcttatgatgaagcaaaaataaaaaatacatttaaaagtttatatccaaatattaatccagacaatagtgttactgaagatttaatatatcaaaattggttgatttcaactttgatgagtaatcctgaatcattagtcacaattgaagcagcttataaagatcttacattggaacaaaaaaatcagttaataggaaatcaattatggagtgcgtcgaatattactgctcggggattggatttggattacattaacagtttaaatttgccagatgctgaaatggaaactggaatctttaataatgtacatttatctgattcacagttaaaacaaattggtgttgatgcttctttaaaagctgtagattactttaaaaatatcaatgttactatagaaaaagacatgtctaacttttatgttttgactggtgcgggatttgtacgtattaatgatactgcaacatctatggtatttgatggtattgaagatatttttggtgctagattaagtagaggtaatctattaccagttcatactgcattgtggaaagatttgataattgaattttattggttgaatacttctgatatttataattcagttacttatagtctaaaatataattcaacaactggtcaattatatgaatgttcacagcaatataatattcaggatcgtagtttaaggtatgaccctccttatgatgctttaatgggctggttattccataatcatgtttgtactggtagttctcccggcgtattgttggcggataaaatatttgatgatttgcctttaggtgaaaatgaaagttatgttttggtttcaacttatacttattgtaaggatgatatgttatccagattgcttggcgtgtctccgggtatgggtaattattataacctggcttattccaatagtgatgtaaatgcaggagcattatggactgctgattctgatataattatcagatggaattcagagactaataccggaactgctacaattattaagtttggttatccgatctttaaagatggtgctgatgaatatgcggaatggatgagatttgtaaaaggcgattattcttctgaaaatattgtctctttaccaactttaagttttgaagttactaaaccaattaccagagatgattataataagattatttccggcaaatccgatgatgaaggaattaatgtattaagttatattagagctctgccagataaaattcctgctgttctaattgataacaatggaatttctaatggaaatgatggtaattccattaataaatatccaaaaaaatctaataacaatagtgcaaacaccaatagtattttttcatcttcaaataattataattccccgagcaagggattaaatcctaatgttggggtttcttcctattctctttcaggcgatagtgatgttgaagataaaggtgaagcaagtagtaatggaaaatcctatgaagtatccaagactcctgcaactaaatccattgattctaatagtttaatttacgcattagttggtgttttggctattggtattttaatcggtttaggttttatgaaacgtagaaaa

SEQ ID NO: 76383 - DNA, 69 bp, Methanobrevibacter gottschalkii
  source 1..69: mol_type = genomic DNA
atgccgggggtacttgaaagcaaaacattaatgaacttcttacaaatcaaggaaatgttgtatcatatt

SEQ ID NO: 76384 - DNA, 3969 bp, Methanobrevibacter gottschalkii
  source 1..3969: mol_type = genomic DNA
gaagagagtatggataataccacatcaaatgatgatgttctaacttcagattcacatgatgatgttttaactctgaattcaaatgatgatattttgacttctagtgaaaaaacatggtatgttggaaaaaatacgactgttggaggtagcggaacacaagaagacccatttaataatattgaattggctttaaatcattcatcaagtaatgatacaatatatattaatccgggtgtttatgatggtccgcataatactaatttaaaaattgatattgataatctaactattaaagcaaaaccaaattccgtattattaaatgcaaatattaataatacaagagtttttgaggttactggtaatgatgtttcaatttcaggtttaaacttctccaatgtgtatatggaatatggtggtgttattaaatgggatggtaatggaggatcattaactgattccactattaaaaattccaagtcccgtgttggttctattcgttgggaaggcaataatgcaataattaataacataactattctcaattctacttccgaaaatggtatacttgtcatatcaggtacttcttccaatataacaaattccactattagagatactaaaggttattatggtgcagttatgtttggtggtaaattcaatataattgataactgtacttttataaacaacactgcatggatgaatggtggtggagtttatgattggggtgcaaataacactgtaagtaattctttatttatagctaacaatggaactcgtggtggagcaattctgacttatgaaaatcagccaaataggatgaacataatcaacaatacttttattaacaatattggtggacaagcaggtgcaattgtagtaagaagagcaggtgcaaacattgataactgtacttttatcaataattcagccggatctgctggagctgttttaatattgtctgaagcaaatatcaccaattccatttttgagaataacagtgcttcaactgttggtggtgctgtatatattacaggtgatggttccactattgataattcaatatttattaacaatactgcaaataacgatggtggtgcaatttactggagtggtgaaaacggtactgttaccaatacaattttcattaataacacagtaaataatgggactggtgaagcaattggttatattaataatgttactttaaataatgttactttggtaaataataatattgaacaagtaattgttaacgaatcaacaccaacatttgaatatgtgtttaaacttactgaaggatacagtaatgttaaattaactgataattatactgcattttgtactgaaaagactaaatggtcctcaagtcctagaactccattaatacctcataatgatttatccatattaaaaaatcatataactggtgaatcagtagcggagtatttgaaaatactgatatacaaatatctgaaagatccagacagaataagaaatttacaacaaaaaatctggatattcactgatgacaattatattgatagtactgattctataatcaaagaggttatttctgattataattctggtttccgtattcctaatcagggattttctgaaattataaatgatacaaccgtacttagaattgattttaaatcatataatattactaaacaaatccaaaacatgataggatttaaaagtagtattgaaaatattacttataatatgagtgttgttaaaaatacattaactccagctgttattttaggtaatcaaacaacttttgaaatcaaagttactaatactggtagttactatttgactaatgttagtgttattgaagatggctatgatggtttaatctacaacagtttttcagatcctagcggaaaatggatattttcaagaaatagtgatggaaaaccaatgtggacatataatggtactctttatgttggtatttcatatagttttaatgtaacattcaatactacaaaaactggtaatttcactaattttgtagttgtcacatctaatgaaactgacaataaaaccactaacaatactactaaggtttataagccggatatgactgttgagaagctttctttgaataggactgtttatgttggtaatcagactgtctttactattgttgtccgtaatactggtgattgtgatttaggtgatgtctttgttgttgaaaaagctccagaaggacttgtttacaactcatttaaaggcaccgactggtcatacaacaatggcaaatttacttatggtaaagttttaaaagtcaatgagtctgttagttttgagattgtattcgatgctgttagtcctggtaattggactaatgttgttgttgcaggttccaatgaaactgataacaaaacaggtaataatactactaaagtttataagccggacatgactgttgagaagctttctttgaataggactgtttatgttggtaatcagactgtctttactattgttgttcgcaatactggtgattgtgatttaggtgaggttttcgttgttgaaaaagctccggaaggacttgtttacaactcatttaaaggcacagactggtcatatgatggcaataaattcatgtatggtaaaaccttaaaggttggtgagtctgctagctttgatatagtatttgatacaattagtcctggtaattggactaatgttgttgttgcaggttccaatgtaaccgataacaaaacaggtaataatactactaaagtttataagccggatatgactgttgagaagctttctttgaataggactgtttatgttggtaatcagactgtctttactattgttgtccgtaatactggtgattgtgatttaggtgaggttttcattgttgaaaaagctccagaaggacttgtttacaactcatttaaaggcacagactggtcatatgatggcaataaattcacatatgctaaggttttaaaagtcaatgagtctgttagttttgagattgtattcgatgctgttagtcctggtaattggactaatgttgttgttgcaggttccaatgaaactgataacaaaacaggtaataatactactaaagtttataagccggatatgactgttgagaagctttctttgaataggactgtttatgttggtaatcagactgtctttactattgttgttcgcaatactggtgattgtgatttaggtgaggttttcattgttgaaaaagctccagaaggacttgtttacaactcatttaaaggcacagactggtcatatgatggcaataaattcacatatgctaaggttttaaaagtcaatgagtctgttagttttgagattgtattcgatgctgttagtcctggtaattggactaatgttgttgttgcaggttcaaatttaacaggtaataagactggtaataatactactaaggtttataatcctggtttgaaggttgaaaaaatcactttggatcctgttgtgtctgttggtgagattacatcttttgagattgttgtccgtaatactggtgattgtaaacttggtgatgtttttgttcatgaagatagttatgaaggtttaaggttccatagtttcaggggtgatatgtggaaacagaaaggtgatactttctattatcagggtgttttaaatcctggtgagtcagtgtcatttgtaattttatttactactttaaaacctggaaatttcactaatattgttactgctggttccaatgttactaacaatactactactgaaaacaaaaccaaagtaatagaaaatcacactaacaacaatactaatggtactaataaaacagttaataatgaaaccaaagaggttaatgttcataaggttgatacttcaagagcaactggtaatccgttactcgcattactcatggttcttttaatgattagtgtgacttctgttagaaaattcaaaaaa

SEQ ID NO: 76385 - DNA, 720 bp, Methanobrevibacter gottschalkii
  source 1..720: mol_type = genomic DNA
gcatattcactttttactcaaaaccaagtccaatatcagacaatagctgttagcaatgcaacaacaatggaagtgccggtctctaaaaattcaacatttttcaatgacgcactaggaatcaaatactatcaggatgacaaaagcggcgttcaggtgattagctggaacggccaggaacaagcatcagctaaaggagcagtcaatattgcctctcaatttgaaaaacaaaaggcaggaacaacacagtcaattgaaaacggagtgccagtttatgaaaataaaaaattgcgttgctttataattgaagttaaaaatgcaacaacaaatgacaacattataatcgttgcaaaagataagaacgtggctttgcacatgcttaaaagcatcaaattcggcgtaagcaacattacaaatgcagctcaagtcgaaccttatgctgaatctggtggaaaccatttaaatgacaataatgacactgtctttgtcttttatccatggtatgtatatgatgaaggtgattatgatgcatatgatgactattcttcaagggattcagaatatgcagatgacagttattatgactattcttcaagtgattcagaatatgcagatgacagttattatgactattcttcaagtgattcagaatatgcagatgacagttatgatgaggaatatgacgagtcagatgaagattatgaaagttcagaggactttaat

SEQ ID NO: 76386 - DNA, 273 bp, Methanobrevibacter gottschalkii
  source 1..273: mol_type = genomic DNA
gctattgactctgctaattggactagtgctgatgtaggttatgaaacatttaaaatacctccccaatatgaaaatccatacagcagtgactttgacatgtatgaatttgatgaagacattgatgtttttacaatcagatatgtaaatccgaatctgatggatttatatggtcattttctaaatgaataccatggaaaaaaggttaatgttgcaggccatgatgctgtacacttcacatattatgataggcatgacaagaccaacaattcagta

SEQ ID NO: 76387 - DNA, 147 bp, Methanobrevibacter gottschalkii
  source 1..147: mol_type = genomic DNA
tggttttcagcaggtgaggaattctattatatcaattggattggcagcaatattacaccggcaattaaggaagttgttaaaagttccttaaaatcaaactacactcataaggagttttacagtatattaaatgataatataaaaatt

SEQ ID NO: 76388 - DNA, 270 bp, Methanobrevibacter gottschalkii
  source 1..270: mol_type = genomic DNA
gcttacacaatgtttaatggcaatactcatttaaacgttacagacaacaccactggaatagacaatagcaccggcattgataataatacgactgttgtcggagataattctccacttgagaatttaaccaacaataatacaacatataaagtatacaatccccagtctgattcatatgtaccggttattggtgaaaaattcgatgaagaagtaaacagatggtatacttacgatgatcagggtgtcagatactacaatacaagaattaat

SEQ ID NO: 76389 - DNA, 36 bp, Methanobrevibacter gottschalkii
  source 1..36: mol_type = genomic DNA
cctaaaatacttaatccggatgcaacttcatatact

SEQ ID NO: 76390 - DNA, 75 bp, Methanobrevibacter gottschalkii
  source 1..75: mol_type = genomic DNA
aagaatatttctacttcattaaataaaacacaaaataaaacattaattaataatgaaacatacaaaaaaacaaca

SEQ ID NO: 76391 - DNA, 60 bp, Methanobrevibacter gottschalkii
  source 1..60: mol_type = genomic DNA
aatgtgcaaggagcaacatcatacataaaagtaattaaatctactactaaagtatatgct

SEQ ID NO: 76392 - DNA, 51 bp, Methanobrevibacter gottschalkii
  source 1..51: mol_type = genomic DNA
agcaaatataatatttatagcattaaaacaaattctaaagggttagcaaca

SEQ ID NO: 76393 - DNA, 51 bp, Methanobrevibacter gottschalkii
  source 1..51: mol_type = genomic DNA
tcaaaaattttaattaaaaaaacaattcctaaaaaaattgaaacattaaca

SEQ ID NO: 76394 - DNA, 162 bp, Methanobrevibacter gottschalkii
  source 1..162: mol_type = genomic DNA
acgattaaacttacagatgattataatgatattgtgaaaaaagtttcaattaaagtcaatatatacacaggtaaaaaatttaaaacttttaaaattacaacaaataataacggtgtggcaaaacttaaaacagataaactctcattaggaactcataactta

SEQ ID NO: 76395 - DNA, 207 bp, Methanobrevibacter gottschalkii
  source 1..207: mol_type = genomic DNA
ataacactcgttaaaacaattattcatgatgatattaaaactttagtgttaaaaaatattacttactaccaaacaaaagatggaaaattcaatgctaaattaggttggtattctaaagttggaagttcatatcaaattttaagaaaaacaaatgaaaattataacataatttctacagtcaaatcaaattcatcatttacaacattc

SEQ ID NO: 76396 - DNA, 120 bp, Methanobrevibacter gottschalkii
  source 1..120: mol_type = genomic DNA
aatttaaaagctgaaattacttggaataaagttgaaggtgcaacaaagtatattatatttagaaaaattggtcgtgatgctaattttaaagctattggtattgttaatagcaatgtatta

SEQ ID NO: 76397 - DNA, 45 bp, Methanobrevibacter gottschalkii
  source 1..45: mol_type = genomic DNA
ccaaaacaattaagaagtattcttaatagtaatacttttgtagat

SEQ ID NO: 76398 - DNA, 48 bp, Methanobrevibacter gottschalkii
  source 1..48: mol_type = genomic DNA
tcccttaaagataatgaaattaaatggggtaaagttccaaatgctgat

SEQ ID NO: 76399 - DNA, 36 bp, Methanobrevibacter gottschalkii
  source 1..36: mol_type = genomic DNA
actattacattgaagttaaataatattgaaaatagt

SEQ ID NO: 76400 - DNA, 282 bp, Methanobrevibacter gottschalkii
  source 1..282: mol_type = genomic DNA
tcaccttacaaatcaaattcaaacaaacacattttttctattccctatagagtaggagaattacttggatgtgtttactataatccttctattccaggttccacttatcatgatttagggcaaaaagatggaaagaatattgaaaatacaaaatattatagatatcgtatttgtagagaggttgttgaccaaatatctattggtgaacttcctggaaattggaaagaacttgataatttaaaaaatagtgaaggtataacaaatacatatattgatgactat

SEQ ID NO: 76401 - DNA, 303 bp, Methanobrevibacter gottschalkii
  source 1..303: mol_type = genomic DNA
tatcttgataattccatattaggctctataaattctgttgatacacatacattcaatggtgcacttaatcatattcttaataaaatagaaactgcgagcaaaacacgtgttgaaagaggtgaatcccctattaaagtaatatttgtagatttatgttattcagatcgtgcatatgataaaacaataaaagaaaatagagatgtaaccaaaaataaaattggtttaacattgaatgattatcaaaatgcattaaataaacagtacaataaatggaaaaataataactttttaacattatataat

SEQ ID NO: 76402 - DNA, 60 bp, Methanobrevibacter gottschalkii
  source 1..60: mol_type = genomic DNA
aaaacaagagattataatattgttaatcaagaaaactgtccatatactacatcagataat

SEQ ID NO: 76403 - DNA, 54 bp, Methanobrevibacter gottschalkii
  source 1..54: mol_type = genomic DNA
tcaaaattcacttatggccaatatggtaatgcatttgcaagttttcttaaagaa

SEQ ID NO: 76404 - DNA, 321 bp, Methanobrevibacter gottschalkii
  source 1..321: mol_type = genomic DNA
gcatacatctctttaaacacacaagaaacaaaagttgacataattactcaaaacactatacacaatggagacattattacagttcaacttaaagatttatatagaaacggaattccaaatcaggctattgatttgaaaattttagatgactccggatgggctcataactataatgcaactacagatgaacttggaatcggtcaaatacaaatactaggccttgaaaatggaaattatactgctcatgcaaaattcaatggaactttatttttaaaagaatctgcaaatcatgtttcattcgaagtgacagacggatatttc

SEQ ID NO: 76405 - DNA, 60 bp, Methanobrevibacter gottschalkii
  source 1..60: mol_type = genomic DNA
tttgaaggtcaggttgcaactgttgctaattttataaaaatgtactttgattctaacttt

SEQ ID NO: 76406 - DNA, 54 bp, Methanobrevibacter gottschalkii
  source 1..54: mol_type = genomic DNA
tatacaattacaatgtgcatcttaaaaaataagttactctattataaatatgaa

SEQ ID NO: 76407 - DNA, 39 bp, Methanobrevibacter gottschalkii
  source 1..39: mol_type = genomic DNA
cttaaatatgaatataaaatattattcacatttaatccg

SEQ ID NO: 76408 - DNA, 744 bp, Methanobrevibacter gottschalkii
  source 1..744: mol_type = genomic DNA
ggtttatttgattttatgggaggaagtgattcatcaaatgatgataatactttcgttgttggttttgatgcagaattcccaccatatggatacaaagacgatagtggaaactacactggtttcgacttagatttagcaaaagaagtttgtgaaagaaacaactggacattcaaagcccagccaattgactgggatgctaaagatgtagaattagattctggttctattgactgcatctggaatggatttactatggatggaagagaagacaactacacttggtctaacccttactttgacaacaaacaaataattgttgttaaatccaactccggaatcaacactccggctgatttgaaaggtaaaatagttgaaacacaaaaagattcctcagctttagctgctcttcaaggagataacaaaactttagctgatacttttggaactttaactgaagttgctgattacaatactgcattcatggatttagaatccggtgcttgtgatgcaattgctatggatattggtgttgcagaatacgatattaaaaataaaaacgctactagtgattaccaaatcctaaaagaatccattaccagtgaaaaatatggtattggattcaaacaaggaaacactgatttaaaagacaaagtacaatctaccttagacgatatgtttaaagatggtactgttgctaaaatcgcacaaaagtatggtatctctgaagatgctttaatccaacca

SEQ ID NO: 76409 - DNA, 36 bp, Methanobrevibacter gottschalkii
  source 1..36: mol_type = genomic DNA
atgatattaagtaacgtgattggacaattgctcgga

SEQ ID NO: 76410 - DNA, 33 bp, Methanobrevibacter gottschalkii
  source 1..33: mol_type = genomic DNA
gtgtttggtatgagtctatctgcagattataga

SEQ ID NO: 76411 - DNA, 57 bp, Methanobrevibacter gottschalkii
  source 1..57: mol_type = genomic DNA
attgcaattccagaaatgtttactgttgcaaaacagattgcagctgcagatgcatca

SEQ ID NO: 76412 - DNA, 42 bp, Methanobrevibacter gottschalkii
  source 1..42: mol_type = genomic DNA
ttgttcaacttcaatgttggcaatttagtgcccttgactgat

SEQ ID NO: 76413 - DNA, 33 bp, Methanobrevibacter gottschalkii
  source 1..33: mol_type = genomic DNA
gtagcgggactcggtgcagatgctcttgctgca

SEQ ID NO: 76414 - DNA, 57 bp, Methanobrevibacter gottschalkii
  source 1..57: mol_type = genomic DNA
gtgcctatattgcagtttatgggagccggagatacaatccaatatgcaatggactac

SEQ ID NO: 76415 - DNA, 36 bp, Methanobrevibacter gottschalkii
  source 1..36: mol_type = genomic DNA
gttcttgcagcaggaaccaccgcagtagcagtatat

SEQ ID NO: 76416 - DNA, 63 bp, Methanobrevibacter gottschalkii
  source 1..63: mol_type = genomic DNA
ccaattgcaacaatattttcatatactgcagccagtgcaagcctgtcacctcaaatcgcaact

SEQ ID NO: 76417 - DNA, 447 bp, Methanobrevibacter gottschalkii
  source 1..447: mol_type = genomic DNA
tatatcggatttggaaatcataatgatgatgggcaaacacaagttcaaaataatgcatcatccagtcccaatcccgttcagtcaacacaatcaagccagcctcagcaatcaagttcagcacaaagtgctgctatggatatacttggaggtagtttttcaactggcagcagcttgtctgcaaaaacatatgccagcatctatgttggttcacaacattccggtgaaaaagtaataatacaaattaaatattcaagagacggatctagtttaaataatgggaatatggttccaaaaacagttgactcatcaggatacattaatgtaaaaagtgctgattcattcaaatattatcctgattttgctgaaatcaacttatttgacactaataaaaaccttttagatacacaaagtgtttcattaagtccagatagtagtactcaaacattc

SEQ ID NO: 76418 - DNA, 378 bp, Methanobrevibacter gottschalkii
  source 1..378: mol_type = genomic DNA
ttaaatggattaaataatagtatacatgttggagattcctatttttctctacctgaaggatatgtggaaggaaatattgttaaatataatgatgtgaatataactaatggaactacttcattaagaattatagaatacaatgataacaatattcaagagcatattgataaatatgtgaactatagcactaatcataattattctacaaaaattaataattttaatgttgatggtatgaatgtatataaatctgaaattatacaaaataataaaacattccattattggtttattaaaaaagataaagtttatgaaattgtaacatgggatggaaatagttacactgataatactgtatttaatttaattaaatcaaat

SEQ ID NO: 76419 - DNA, 117 bp, Methanobrevibacter gottschalkii
  source 1..117: mol_type = genomic DNA
ttttatccaatggatattattccagaaccctaccatcaatatatgattttaaatcctattttttggattattgatcaatttagacatatgacactatggcaaagtatgccatctaca

SEQ ID NO: 76420 - DNA, 69 bp, Methanobrevibacter gottschalkii
  source 1..69: mol_type = genomic DNA
accggaatgattcctgcagatgcaattaccaactatcaacaattaattgctggaaatatgacccttcct

SEQ ID NO: 76421 - DNA, 33 bp, Methanobrevibacter gottschalkii
  source 1..33: mol_type = genomic DNA
ctacaaataatatttagaacaactgcaatcggc

SEQ ID NO: 76422 - DNA, 42 bp, Methanobrevibacter gottschalkii
  source 1..42: mol_type = genomic DNA
gatgataaattcctcaaggaatcatacaaggaatattattca

SEQ ID NO: 76423 - DNA, 168 bp, Methanobrevibacter gottschalkii
  source 1..168: mol_type = genomic DNA
aattttaataatgcaataggcatttcatgttcagatgtttatatttatcttataaattctctttattatactggagaaaaagtaaatataacaaattttatccatatatctccggttgtctgttttttgacttctcttttttttagagtgggttttgttgataaattg

SEQ ID NO: 76424 - DNA, 177 bp, Methanobrevibacter gottschalkii
  source 1..177: mol_type = genomic DNA
atgggaaatggcagatttgatgcagctagtcaaatggcgaatggtgtaaaaggaacaaatggagaactcacagatcctgcatacaatccagattcaagttattattttatgaattatataaattacatatcaaattcacatactgtatttgaaataaaccctacattatactcccct

SEQ ID NO: 76425 - DNA, 291 bp, Methanobrevibacter gottschalkii
  source 1..291: mol_type = genomic DNA
ttcacagcaacagttgaaccaacagacaaatacatgagtcccgaagaaatttcaaattacataatcgacagcaatccggactatgaaaatatgaccattggagtttacaacataagaccatacagctggtgggttggatcaaataccataggaatcccttcaagccatcaaagtgaaatagagcaaagcaatataagttattacatcgtgaataagcctatggacaatttaacaaattttactgaaataaaaaatattaatgaattatatttatataaaaataataatttt

SEQ ID NO: 76426 - DNA, 168 bp, Methanobrevibacter gottschalkii
  source 1..168: mol_type = genomic DNA
aattttaataatgcaataggtatttcatgttcagatgtttatgtatatctcttaaatgcactttattataccggaacaaatgtacactcaattgacaacattttcttgtctccggttgtctgttttttgacttctcttttttttagagcgggttttgttgataaattg

SEQ ID NO: 76427 - DNA, 183 bp, Methanobrevibacter gottschalkii
  source 1..183: mol_type = genomic DNA
gggatgggtaacgggcaattcgaagcaggcagtcaaatcgcaaatggtgtgaaaggaacaaatggagaactcacagatcccgcatacaatccagatataagttattatttgacaaacttccccaactttatatcaaactcacatacaatatttgaatcaaatcctgtcttagaataccctacc

SEQ ID NO: 76428 - DNA, 291 bp, Methanobrevibacter gottschalkii
  source 1..291: mol_type = genomic DNA
ttcacagcaacagttgaaccaacaaacaaatatcttgcaacagaagagatatcaaattatataattgacagtaatccggactatgaaaatatgaccattggagtttacaacataagaccatacagctggtggattggtccaaatacgataattcttcatgcagatgcccctggagaaatagaccaaagtaatgttagctactacatctcacaaagcagaatagataacctaaaaaattttactgaagtaaaaaatagtggtggtttacatttatatgaaaacaataatttt

SEQ ID NO: 76429 - DNA, 36 bp, Methanobrevibacter gottschalkii
  source 1..36: mol_type = genomic DNA
gcatattcattacttactatggattatgaaaaagat

SEQ ID NO: 76430 - DNA, 294 bp, Methanobrevibacter gottschalkii
  source 1..294: mol_type = genomic DNA
agtaatttttcagctgatgttcaaacggatgattcggatgttacagatggtggaagtggaaaacctaatgttacttctgtttcaggtgattctgaatactatgtaatgcctgtagctaatttacataaagttacagttaatggtgttgataagtcagacacgattctgaatagtgctgttggtgttcaagcaaatgtaattgataatggtaaaattacaattaaacctggcgaaattgatattacaactcctgatggagtttcaccggataaagctgttcagcgtccacaactt

SEQ ID NO: 76431 - DNA, 63 bp, Methanobrevibacter gottschalkii
  source 1..63: mol_type = genomic DNA
atgattattgagagtattatgccatttgttgatgggatagtggatatttttactcaaggggga

SEQ ID NO: 76432 - DNA, 45 bp, Methanobrevibacter gottschalkii
  source 1..45: mol_type = genomic DNA
aaatcattaggtgtccatccggattctgctgcaatggcagaaggt

SEQ ID NO: 76433 - DNA, 897 bp, Methanobrevibacter gottschalkii
  source 1..897: mol_type = genomic DNA
tatgaacccgctcaagaagaattaacccttgcaaaaacaacaaaactaaatgaattacatgaaatatataatggaccattaacaacctcccagaattccattttattagaaaaccaaattaatgatggaaaaactcccgaagaaattgagcgaataaacatattaacaccagcaacaaaagactggcaatcatttcacaaaaaatcgatttacacaaataaagataaatataatcgaactatggcaatatattcaaatgaaagtaaaaacataattctttcaacaacaaaagccataaaaattgtaaatgagaataatgcagaagttttatcaaaaattaaatttgaagaaccaaatacagtatcagttcccattttaatctcaagacttcaggcaggagcaggccttgtaaatgttggaagcgtggtggacatttacacaaacaacaataatacaaatgaaaattatactccaaataatacaagtccaaatataagtggatgtacagttttagccataatgagatatgaagacaatggagaaattgattccaaatattctaaatcaaatacaataataaagggaaaccataccaatccaaaagaaaatacgaaagaattttcctcagatgttcttgaattaataaaaggatcgataattaatggttatgatgaagaaaaaaccattgaaatacttaaaaattatggaataaaactatcaaattacgaaagacaaataaatttaggtgatttaaatgcacagtatatgcttttaattgaaacaccacaagataaagtggaatatgtaataaataatatggaaaatatcatattaacaatccccacaacaaaagctcctaattggatggtaaatgaaataagttcaacataccaagat

SEQ ID NO: 76434 - DNA, 459 bp, Methanobrevibacter gottschalkii
  source 1..459: mol_type = genomic DNA
ggagaagtgaactacttttcatctaaaatagctgtggaaagaaacatagattcaccaactattctgatacctagcattggagtgaatgaaaaaatcaataatgtatcattaaatcaaggagtattaagtgatcctggagaaaacatccccactaaagattatgtagcattatatgggcatagaactcttcaaggttcaccatttttcagattaaatgaactttcaattggagattcaatactattagaatggccaggagttggagaattaaattacacaataacaaatacaacaattgtgcctggaactgctgatgtacctataggtggaaacgattcattgttcctaataacatgtgatccaattgggtctactgcaaatagaataataattgaaggaacattagaaaaacaaaatcctattaataatgaaattattaaagaaaatccacaagaatca

SEQ ID NO: 76435 - DNA, 57 bp, Methanobrevibacter gottschalkii
  source 1..57: mol_type = genomic DNA
aatccaatcccttctgaaataatttacgaaaaaataatatttttaaatggaggatta

SEQ ID NO: 76436 - DNA, 51 bp, Methanobrevibacter gottschalkii
  source 1..51: mol_type = genomic DNA
ttaagttcaacttatccaacatttatggatgcagtatttgcgattagaaat

SEQ ID NO: 76437 - DNA, 75 bp, Methanobrevibacter gottschalkii
  source 1..75: mol_type = genomic DNA
ggtacttgccctacttcagctattgaagtaacacctaatgctattgtacattgtgacacttgtggtgaagaacca

SEQ ID NO: 76438 - DNA, 36 bp, Methanobrevibacter gottschalkii
  source 1..36: mol_type = genomic DNA
ttaaaagtagaagaatatgaaattgctgaaggtatt

SEQ ID NO: 76439 - DNA, 63 bp, Methanobrevibacter gottschalkii
  source 1..63: mol_type = genomic DNA
gcatgtcctggtgatttcattgctgctaacagttctagtttaactgttgctattcctagtgta

SEQ ID NO: 76440 - DNA, 72 bp, Methanobrevibacter gottschalkii
  source 1..72: mol_type = genomic DNA
cctactgaagctattcgtgtagttaccaaaactggtatgtcctgtccagctttagtagaaactgatgctgaa

SEQ ID NO: 76441 - DNA, 60 bp, Methanobrevibacter gottschalkii
  source 1..60: mol_type = genomic DNA
tctaatgatgcattaaaagttgaacaatacgaagtaaccattaatggtgaagctgttgct

SEQ ID NO: 76442 - DNA, 39 bp, Methanobrevibacter gottschalkii
  source 1..39: mol_type = genomic DNA
gactgtatcgaagcatgtccttatgatatgattcacaaa

SEQ ID NO: 76443 - DNA, 39 bp, Methanobrevibacter gottschalkii
  source 1..39: mol_type = genomic DNA
gacactgctattaaccaaagtagttttgtatctgaccct

SEQ ID NO: 76444 - DNA, 39 bp, Methanobrevibacter gottschalkii
  source 1..39: mol_type = genomic DNA
attccaattaatggtactgcattacatgtattcccatta

SEQ ID NO: 76445 - DNA, 45 bp, Methanobrevibacter gottschalkii
  source 1..45: mol_type = genomic DNA
ccatcaaaagttttcattccattattcatgaaaatatttggtgga

SEQ ID NO: 76446 - DNA, 2190 bp, Methanobrevibacter gottschalkii
  source 1..2190: mol_type = genomic DNA
agtgaaatatctgcagatgataccataggactagctgatgacggatctgatgtggttatggatgacaaaccaattgaaccgtccaatccaacaacaccacataaagtggatacaatgattgtttctagcgatactgtatcaataaatgaaaaagaaaaaataaaatcaattgatttaactgtaaacgataccaataaatctaaagtcattgctggaattacagttaaaaatttaacagttaaagaaggaacaaaaacaataaaatttgattataataattcgaaagtcattattaaagacgcattagttcttggtaaacatgatttacttgttagctatttaggtaatgaaaattacactaattcttcaaaaaacattgttttaacaatttttggaaattatacaatccaagcaccaacttcagttgatgtaaacagtaccaaaattgttgaagtgcctatcaatgttacaaatggtatcgatccaaaagaacttgtaaaagatgattttaatgttacattaacatataaagatggaaatatcactaaagcaattaatataactgattttagaattataaataatacaataatattcaattatccattatcaaggaatattactacctcaacaataacccttgtttatactgctaatgaaactgttaaatcaaaaaatgttacaataaacagaatttacaatgttaaaattgaagggattaatactaaaaatcaatacaaaaatggtaattttacatttagattaaccgatattgataatgcaactgaaaatttaactggttttaaattaaacttacttattggtaaaaatgttataaaccagattacaggaactgctgacaaaaatggtattgtaaactttaaaacaagcaagatattcggatatgatttcaataacaatacaattgtaattaaatacttaaatgttggcaataacactgttgaattgaaaagtggcgacaatgtgaaattaacaacaaataaagttaatttaactattgaaaaagcaaaaatcaacattactattgataaatacaacgaacaatatggaagtaacaaaaatttaaccattactgttataaatgcagataatggggaacctgtgccaggaatcattctacatttaaacatgcctcaaaccgccggcaaaaactattacattcagactgacacaaatggaataggcataatatctgttaaaggattaattcctggaaagtacaatttaactgtaagcaacaatgacactgtaaatattataaataataaggcaagcagtaaaattattattacaccaaaaccagttacaataaagattacatctggtttaactattaattataacactggaaatactgcagccatcaaagttactgataaaaaaggtaaaggagtgtctggagcatatgttcttgtccaattatatactggttcaaaatcagcaaattatcttttccaaactgacaaatatggaaatattaaatttaaagcaccgctttcagttgggaaacataaaattgttgtgagtggtgcagtaggatacagttcaagcaaagttaccaaatatattaaagttaaaaaagctactgcaaaaatcagtgcgccaaaagtaaccgcatactacaaacaaggaaaatactttacaataaagttaattaacactaaaaaaagcaatgcaccgatttatgctgcaaaagttgacatccgagtatacatttcaaattacaaatactacaaatttaatggaaaaaccggagtggacggtaaattaaaattatcaattgatttaaaaccgaaaacttataaagttgaagttagaggtgcagattccaaaaattatgctgcttcaaaagtagtatccaaaatagtagttgttaaagctccaactaaattatatcctgcaaaattaactgctaaaaaaggaacaaataaatactttaaagttactgtaaaaaacacaaaaaccaaaaaagttattcctggcgttaaagtaaagatcaaagtttatactggtaaaaaattcaaaacttatactgtaaaaactaattcaaaaggaattgcacaatttaatgtaaaatcattgagtgttggaaaacataaagctattgtaagttctgcaaacaaatattgcattgctaaatcagctaaaaactacataaaaataactaaa

SEQ ID NO: 76447 - DNA, 180 bp, Methanobrevibacter gottschalkii
  source 1..180: mol_type = genomic DNA
tatgaactttcttcagttgcatcaactatgcttgcatctagttctactgcagatattaatgaatctattttaaaattaataacctatttgcatattgatgttaatccaaatgagatttctcaatctattatttcttcatttgaaacaattgcaagctatgttatgaattatggtgtaagt

SEQ ID NO: 76448 - DNA, 465 bp, Methanobrevibacter gottschalkii
  source 1..465: mol_type = genomic DNA
gctcaggaagataactcagatatcactatgatgactttatctaaaggaggtattgttattcattacccttctaattggggttattctcagtccgattctaattattcaataatgtcaatatctaaactggattcagttgattccgctggtgtaggtcaagttaatattaattttgagaaaaaagctattgaaggagatttttatacttatttgaataacacctataggtcaatgcaaagagattcttctttcaatttaacctcttcaggtgaagtcatggtaagtaatattcatgcatatgaatatatgtattcttctaatcaaaatggcactgtaaaagagcacaaggctgtttggtttgaaaaaggtggacaggcttatgttatgttgtatagcgcaccggtaaatgattttgaagataacttatatgtatttgattatatactatctgatattcaaattaca

SEQ ID NO: 76449 - DNA, 336 bp, Methanobrevibacter gottschalkii
  source 1..336: mol_type = genomic DNA
gtctttaatttagatttcaacaatatttctgaaacatctaccgtagctatggttcatgatactgcattccctgatattactgaagatattaaaaatactacaaaaactacttcttcatctaatactaattattcatctactagttataatgtaaaaactactgaagattcttcaagtgattctgattactctgatgggggtagaaattctggttcaagtgattctacttattcaggtagtgattcgggttccggatcttcaggtagtgattctggatcaggtagtgggtcatcaagtaatagtggtggttccgaatctaatggaagaagtgatgaa

SEQ ID NO: 76450 - DNA, 93 bp, Methanobrevibacter gottschalkii
  source 1..93: mol_type = genomic DNA
agtttcacaaaagcatggggtgcaaacccagatacattctttgcaagcaacgtattgcaagcaacagattcaatatctggaatattccaaatt

SEQ ID NO: 76451 - DNA, 72 bp, Methanobrevibacter gottschalkii
  source 1..72: mol_type = genomic DNA
ttaaccttaccaggagcatcaattggatacacacagatatttacccctgattggaatgcactaactaactta

SEQ ID NO: 76452 - DNA, 108 bp, Methanobrevibacter gottschalkii
  source 1..108: mol_type = genomic DNA
ggattcatggccttatctacaaaaattccatttgatcaactagtaactgaaggaacaggacttgcatttgtagtattcccacaagtattcaacactatgggaccaatg

SEQ ID NO: 76453 - DNA, 72 bp, Methanobrevibacter gottschalkii
  source 1..72: mol_type = genomic DNA
actgctgctagaagtattttcttaaaggatatagttgcatttcaacaagttcatgggccatttttatttact

SEQ ID NO: 76454 - DNA, 105 bp, Methanobrevibacter gottschalkii
  source 1..105: mol_type = genomic DNA
agtggatttttcttatacaatgtgggtaccgatttattgaatgtggtgccgcctacaattcaaaacgtattacattatcccgatgttactaatgcaggtattatt

SEQ ID NO: 76455 - DNA, 102 bp, Methanobrevibacter gottschalkii
  source 1..102: mol_type = genomic DNA
catttaagtagcatgattaatgcaggtgtaagtaatatttacaatgttttaggaactaaaatagctccaaatatggtcactgttgttatttttgatttcaga

SEQ ID NO: 76456 - DNA, 93 bp, Methanobrevibacter gottschalkii
  source 1..93: mol_type = genomic DNA
aattatggcctccattactttggaggatatgaaccaattttggataatgtgacaaatgttgtgtatcatcctgcaattacatattcattcaca

SEQ ID NO: 76457 - DNA, 72 bp, Methanobrevibacter gottschalkii
  source 1..72: mol_type = genomic DNA
ttaacgggtagtgtaaatataactgatattgttactgcagttcataatggtttagttaatgccaaatctcca

SEQ ID NO: 76458 - DNA, 42 bp, Methanobrevibacter gottschalkii
  source 1..42: mol_type = genomic DNA
cttattatacatggaatttctagctttgtaggaggaatatta

SEQ ID NO: 76459 - DNA, 90 bp, Methanobrevibacter gottschalkii
  source 1..90: mol_type = genomic DNA
ggttataaagcaggtggtgttgtacctattataatgccgggtatggacacatcatggtttgcttcaaatgcggcatatccattacctttt

SEQ ID NO: 76460 - DNA, 39 bp, Methanobrevibacter gottschalkii
  source 1..39: mol_type = genomic DNA
tcatctttatttaaattgtttgaaatgtatattaaatat

SEQ ID NO: 76461 - DNA, 87 bp, Methanobrevibacter gottschalkii
  source 1..87: mol_type = genomic DNA
atgcacctgaatattattgattctatttattattctattattaccatggcaactgtaggttatggagattatacaccacatacagga

SEQ ID NO: 76462 - DNA, 42 bp, Methanobrevibacter gottschalkii
  source 1..42: mol_type = genomic DNA
gttgggatagaagatattattgatgctcttaatgtagctaaa

SEQ ID NO: 76463 - DNA, 96 bp, Methanobrevibacter gottschalkii
  source 1..96: mol_type = genomic DNA
accaatatgcccccaattgatgctatctttgaaagcatgtctgctctaacagggactggagtgacaatgtatacaaatttagaaatattacctcat

SEQ ID NO: 76464 - DNA, 99 bp, Methanobrevibacter gottschalkii
  source 1..99: mol_type = genomic DNA
ggaatgccactttttgattccctatgcaatacattttgcataatttcaactggaggtatgaatgttaaaaatgcaaacatgggctattaccataacgac

SEQ ID NO: 76465 - DNA, 102 bp, Methanobrevibacter gottschalkii
  source 1..102: mol_type = genomic DNA
tcaaatattgtcccgatggaattattattcacagttgtatcagcaattacaacaacaggggccagcatctcctcatctttaacaatggcgagttggccatct

SEQ ID NO: 76466 - DNA, 93 bp, Methanobrevibacter gottschalkii
  source 1..93: mol_type = genomic DNA
ggccatgacccatttgacagtttatttgcaactgtatcacttcaaggcaacaatggtttagacctggggattattaccaatcaaatacatcct

SEQ ID NO: 76467 - DNA, 117 bp, Methanobrevibacter gottschalkii
  source 1..117: mol_type = genomic DNA
ttctatcctatggagatagttccagcaatagtgcaaagaatatttacattaaatccagtttattcagcaatttcttgtttcagagagtgtattagctatggaatttttccgaatact

SEQ ID NO: 76468 - DNA, 441 bp, Methanobrevibacter gottschalkii
  source 1..441: mol_type = genomic DNA
tcaaccactgttgggaatgcgattactgtagtaaataaaactgttgtcacattaccaaacgaattctcaattgaaagtagagaaactggctatggaacattaattaataaaaatacaaaggaaaaaattaccattaaagatttaggtaaaggaaatttagcattaactaagtttaaaaatgcattaacagatttaactaaaaatcccgatatcgatcatgttaaaaattcaacatcaaacattaataatatcactgcatataaaattgattatcaggatattacaaaagagaataattcggatttgagtaatgtttatgtatttacttgcaatcacacattcttaattaaattagaaaattataataataacgttaagtcagataatgatttggattatgtaattacacatatgacccctgactttaaacaatctcaagat

SEQ ID NO: 76469 - DNA, 3447 bp, Methanobrevibacter gottschalkii
  source 1..3447: mol_type = genomic DNA
gaaaatgatgttgctgtaagtaatgatgtgggtattgttaatgagactgttctagaagtaagttctgatgattcggatttatcagaagctgatgttttagaaacacaaactaatgttgtaactaaagatactttccataattattttggaaatgatggtacattattagataatgtttctagtgatgagttaatatttaaaggagattttactggaatcgatgtcagttatatgacaattggtaaatctgttaagttatctggtggtaatactactcttaataatgttactttcattattggtgcagataatgtggtgattgatgggtttgttcttgatcattctgatgtttatttatttgatatagaaaatgtaaatggtgtaactttatctaataatataattaatttcaaaacacttgaagggacagagggttatgctatttttgccaatactgtaaatgattttaaaattatcaataatactataaattatgttggtaatactaaaggtacgatggttaataatgctattcgtgtaactggtgatgaagattctgcaattgcttcaaaaaagattattgttgaaggtaatgtaattaatataaaaatcccttctgtggatgtgggttatgatcctgttacttgggaatcaaaagttttttctgaaggtattgttttctattattgtgaggatgtaaaatttatagataatcgtgttgatttaaaatataataattttagtggtggtttcgatactatttatgcattaagtgtaagaggaaatccttataactttgagaatacaattgtttcttctgacattgaaattattaataatacaataaatgctaatggacataattatatttacactattttcctgtctgctaatgattttaaactttttaataatgtaattaattcaacagctgatttttattatgctaatggtattaatattgatggtcctgcatctgaaggtattgtaagtaataatttgataagtgttgaatcaccatatgatgtttatggtatttattcttaccaaatgaatggtcccattgaatatatttcatatgtaaataatacaattataggtaaatcttatgttggttgcggtatggaaattgttgaatgcaatccatacattgcagataacctcataatcatgaatggtaattatacttttggtgttgttgcaagtattagggataatggtactatttctaataattcaatatcttctttaggaaataataatggtactgatggtactggtgatcctttattgcctttaaattcattaggtattagtgtaaagggtagtgtattaattgaaaaaaataaaattaactctgggggtattggtttaaaccttgtcgaaaaaggcaatattactattaatgataataatattaatgttaatacgactggtggtgttgaaagttatgcaatttactctgataaattaagtaacttagttatttctaataataatatcttatttactggaaataccaatggaactatggttaataatgctattcgtgtaaatggtgatgaaaataaaaaaataattgctaaaaacattattgttgacaataataatatcaatattaatattccttctattgatgtgagttataatcctgtaacttatgaggcaactgtttattctgaaggtattgttttctattattgtgaggatgtaaaatttatagataatcgtgttgatttaaaatataataattttagtggcagtttcgatactatttatgttgttagtgtaagaagtaatccttataattatgtttttgatgaagaagacaatataatttattcaattgtcagttctgatattttaatttctaataacacggtcaatgctctgggtaataattatacttatggtatttatatttctgcggagaattttactgttggtgataattttgtaaatatttcttctgatggtaaatatgctaatggtgttaatgttgatgcattgtcaagtaatggtgttataaaaaataataatgttattgtgaatgctgatattattgtttatggtgtttattctgcaaattttatgggtcctattgaaaatattacttatgataataatacaattagagtaaatgcttatgctgcttgtgctatggaattaatggagccaaatccttatgtttttgataacacaataattgctgctggtaattatacttttggtgttgttgcaagtattagggataatggtactatttctaataattcaatatcttctttaggaaataataatggtactaatggtactggagattcaattttacctttaaattctttagctatcagcactaaaggtgatgtgataattaaagataatgagattgttacatcagggattggtgttaaaacattaaaaggaaatgttgatattctaggtaatgacattagaactactggtaatcacactattgaggctataaattctaatttaactgtaaaaaataattatttggtatctaaaaaagccgtaggtactgattccattgtttcagataaggaagttatatctgctaataatactcctgcattaaaaactattatatctgcaccaaatatatttactgaatatattaaaggtgctgtattcccagttgctgcattagatgaaaatggagatccaatttcagatattgttctctttttaacaatggacggtattgtttataatgtaactactgatgcaaacggctatgcagcatttttacttaatcctgattcaggtattcataatgttgtggtctcatttaatggtaatgaggtatatggtcctaaatcagtaaatagtattatttctgttgatgcatctgcaagtaaaatcgttgcaaaaacatctacaactgtttatttaacttcagttaaatctggttcatactttaatatagctgtaaaggatgtgaacggtaaaggtttagcaaataaaaaagtttctatttacttcaatggtaagactaagagttacacaacaaattcattaggagtaatcaaattcaaactttctgctaataaaataggtaattaccaattaaaaatgaaatttgctggggataagaactatactgcatctactgcaattgcaaaaatcaaagtcattaaacaagcaactaaattaactgttgctaaaaagacttttaaagctaaaactaaagttaaaaagtacactattactttaaaagacaataaaggtaaggcaattaaaaaagccaaagttactattaaagttaaaggtaaagtatacaaagcagttaccaattctaaaggtaaagctacttttaaaattaccaaattagctaaaaaaggtacttataaagcttatgttaaatttgcaggtaataaatattataaagtatcttcaaaatctgttaaaatttcagttaaacga

SEQ ID NO: 76470 - DNA, 3990 bp, Methanobrevibacter gottschalkii
  source 1..3990: mol_type = genomic DNA
gataatatggaggatactttaaataataatggttctattctgagtaatccatcggatgaaagtattttgctttctaatgatgatgttctagctgaatttacaacacatgaaataaatgtagaaaagtattctatttattttaataataatggtgatctaatttcttctaaggttaaatctggggacacacttaattttactggagattggaatgaagttagttctaaaacttttaattttaataaaactttaaatattgtttattctggatcaaaaccaatgaaaaacggtgttttcacattttataatggtgcaacaggaagttccattattggcttgaatattgctaatactgaggattataattatggaattttcttaaatggtgcaagtaactgcattgtaaaagattgttttattaacaatacaggaatgtcctcttatgcaatttgcatagccaataatgcaaattacaataatgtatcaaataattttttctgtgattatggtatgaattatgggggtcaaggaactagatcaacaccacctgtacttctttctggtgctcatcataactatattgcaaacaatcatattgaatgtgatgatgcaaacgggatatatttgtcttactatgatgggggtcctttgcatggtggtgtttctaattataatttaatttacaacaacactgtaaaatataatgttttgccaacttcatggggttatggtattcagataatgggtggatacaataaaatttattccaataggataattggtgcattcagaggcatttcaacttcaaatggtgcatttaatgagatatttaataataggattattaatattactggtgcggattttaatcatcctgttgttgaagttggaggggagtatggaattgttggttcagcaaatgcgataataataaacaattctattgaaaatgcaagaatacttccaggttctggtgcgatttatgctattgataatgcaattattgaaaataatactattgatgttgtgtcatcaggatatggtattcaggcaagtggaagtaatatttctatcaaaaacaatagtataattactgaatctggtgctggtgtcttttggaaaggcgaatattttgatttggttgtagttggtaataatattacaagtggaaatggtgttggtgttttagttaaaaaagaaagtgttaaaaaaatgccagggaatataactattgttgataactatatttctactggaaataagtatgcaattgatgcaattgaggttaatgcagatactagttatgttattgaaaataatactattcctaagggtaaaggtattgttgcaactcctgaagggtcatatgatccatcaaaaccacgttatatctttaagggaacaacttatagtattactcctgaaaattatgatgattattttgatgtgggaggtactttaaattcagttgttaaaaatggagatattttatatttcgatggtaattttgagaataagggtgtaatatatattaattctgcagtcaaaattactggtaaaaatccgaatttttataatgctacttttaggatatctgaaggtgtctggattgaaaatttaacaattaaaaataaagattctgaaagaataaatgcatggggaatccttgtatataatactggtggagcgataatttctaattgcaatattgaagtaacagatccaaacgcagcatatgcaatttatgttgtagaatcaagcgatattgatgttttgaataataaccttacatctaatggtaattatttaacttatacattacttgctataagtgtctatgattgtaattttatcaataatagtattcataccattggaactggtattgagcatgtatttgaaaatagtcattgtgttgatggcaattctaattgtatagatggttctacttgtgttggtggagatactgtttgtacaagtgggaatactataactggaaatcatgttttaaatgaggtttataggacttatggtattttgatggcttattcttctggttgcaatatttctggaaataaagtaaatgcaacttctaagcttaataaaacatctaatacatttaattcaagttggggaaataattatcataataatatatctacaaattctattgttggtatagatttatattttaatagtcataataataccttttcaaataataatatttatgtaaagtctaatgataattatatttatggtatgggtgtattaggttctaatactgggcatgatgctcctgaaggaaaagatgcatctaataatcaatttattaacaataatattgttttggaaggagattattttgttcaaggtttagttattggccatgaatcaaaaaacacaactctcatttcaaatactgttaatgctaaatctaataatttttcatatggtattaatttagaagggtctcaaaaatcaattattaaagataataatctaaaattaacttcagatattgtttatggacttgaagtttttaggtcgaatggtaattttattaaagggaataatcttgatataaaagctaagcaggcatatgctattgcactttcaaatgctgagaataatattatccttaataatattgtaatgaataatgttactggtgaggaaataacttataatgtgtgtgattcattaggtgttggggttgctggaatctgtcttaaatttaattcttctagtaataatatatctggcaataatataacttctaaaaaaggttatgcaattgttattgataaattagcaattaaaaataatttattttacaattatttaaattctgaaatgggtattggtgataaagctattaataacacaaataataattttgttaaaggtaattacatctatattttaaatggattaattccggaagtaacgattaattatttgggtactgcagatattgttttgaatgttggtgttgatggggtattggttaaattttatatttgtggggaagaaattggtaatgcaacttcttcaaatggtgtagcaaaattaagatataaatttgatgatagttatactcctgcgggttattcgattaaagctattgcatctaaaaaggattacttaactaaagagttcatttcttatttaactattgaaaaaggtcttcttaatattaattataatgatgtaactgcaattccaacatctaagggaaaatttgtagttgttgtagaagatatttttggaaattctgtatctggaattactgttaaattttatagacttcaaggaagggatgttttcataggtaaagtaaaaactgataaaaatggtgtagctactcttgttgctgaagtaccttcacttggtaattataaattacgtgcagatgttgttgaaaatgacaattttaagtcaaacagtggtaaagctaatttgattgtggcttataaaccttcaatttatcaatataaaactaaagctgtttattatggtaatactataaaatatacggttcgtgttaagggtattgatggtaaatatgttgctgggggtaaaattgtaactattaaagttaacggaaaaacctacagggttaaaactgataaatatggtaaggcatataaatccattaaattaaaagcaggttcttataaagtaactgctcaatatggggttactaaagtttcaagtaaaattaaatttaagccaattttaatagctaaaaacattgttaaaaagaaatctaaaaaaattaagttctcggttaagttagttaataagcatggtaaaatattaaaatacaaaaaaattatttttaagattaaaaataaaaaatatagtgcaaaaacaaacagtcatggtgttgctatattatctattaaaaacttaaaaataggtaaaaatactattacatcattttatggtggttgcacaatatcaaatacaataactattaggaga

SEQ ID NO: 76471 - DNA, 4608 bp, Methanobrevibacter gottschalkii
  source 1..4608: mol_type = genomic DNA
aataacactacagtaactgatgttttatccactgttgaagatgatgttggtattcaacaaatacagagttttcaagtagatgaacctctattggctgcgactaataataatattcagattaatgttaaacatcattataatgaaacggctaatacatgggatgaggatggttataatttagctaatgcaacagttaaattatatggtgctaatgataaattaatttcaacacataagacagattcaaaaggttcagttttaattaaaaatttaaaatcaaccaaatattatgttgaagttagttatgcagattatgaaccaaaaaaatctaaagtattggattttactaaaaaatccggaactttaaaaggatcatttgactttattcctgatattctattatttgtagattataaatcccataatgaaaagttaaatgttttaatgaatatgtctaagagagtggctttcattagcactgggcaagattatgatgtgtctcgtgaatggttagttgggtatgcacgtttcattcatattgatatgttttccgaaggagcatatgccatattcactgctgaaaaattaaaaaaattgcttgctatctctccagctaatgcaaattataatgttgcatatacattcggtgtttatagtaattcaattttaaacgctactggtttacacattgttggtgcaaactcgaagaataatactttcaatactattgaaaacacttatattggttcttatttccaagccaaagacattaacttatcagatgttttgtatcataatatggaaaactatttgaaatatgtgtattatttaattaatccgtcaaaatatgaaaatcccacacttaatgattctaatgctcctcaaatgggtccagaatgtggattttatcatccagatttaggtattttcaccatatatcctgaaggtagtttaataaataattggattaaaactaatcctggatatggtgttgatggaattggtagtttaaattggatgatacaggattatccaaagtggtttgtagatctattggatcctactactttatttgaacagtttgaaaatcaatttattgatagatttaatcctaataagaaattcatagctattgtttcttactattgtggtggggaagttgttgattctttaattagaggttatgaagaaattggaaggcctgcattcaatgtttttaaattttctacagatccttcaatgtcttcaatattaaataaaattaataatgtctcaaaaataggaatttcttctattacttcattatatagttggtctttaagttatgctaatggttctgctgaaaaagatttatctgatattgatgttgaaatccttaaaggtgtaaatgaaatttcaaaatacagttatgaaagtgaacttggacctcaagttgagtggacttactctgtgacttatccgagttttgaaggggtgtttagtcctgttattttatcgtatctagatgaggataaggttcatgtaattcaatcaggtgttgataagatggttcagctcagtagtaggtgggctgatttgaaagatttaaataactctgaaaaaacaatagctattgttctttataattatcctcctggtaaagccgaaattggcgcatcttatttggatgtaatgcaaagtacttatgatttacttattaaattgtatgaaaatggttatgctattggggatattaggaaaatgatgaatattacagaattcactaatttattaattgatagtggtaacaaaggatcctgggctgggggtttgttaaaaaaatatgttgaaaagaattgggatgaattagttaaacataaccaattaatctcaatggatgagttcattgatttaacttcagatcttccagatgagttatatgaggaaatggttactcaatggggtgctggtttaggtaaatcaatggtttatacagctagtgatggtaaacagtatttggttattcctggtgtttggtttggcaatatttttattacttatcaaccaagcagaggttgggaagaagcagatattggtgaagttattcaaaattaccatgatttgaaattacctcctcatcagcaatatgttgcattttatgagtggatggataaagtaacaaaggctaatgcaattgttagtatgggaacacacggaacattagaatggttacctggtaaaaatatcggtgttggttctggagattggtcctatgaattaacaagaattccaacaatatatccatatattgtatctaatcctggtgaagctatggttgcaagggatagaggtttagcaatgcttattactcacatgactcctgctatagtatcatctgagttatatggtaattattcgattttaaataattatattaatagttataataatcagattaaactcaatgttacttctaatgctaatatatataaagaaaaaattcttaaattagctcctaatttaggtttcagaaagatgtctaaaggtgagtcttttaatcactggcttgaggaattgcacctttatcttgaaagtatgggtgatgacctaatgacttatggattacataatttgggtaaagttttaacaggtaatgaactatctgaagaagttgttacaatcgtaacttctcaaactaagatttataatcaaataatggaatttttatatcctaatttaaaaggcaaagatttttataaagatattcaaggagatgtaaaataccttaatgaacgtcatactattcaggcattcttaagaaactatgttgatggcttagttaacggatcttctgttttggatttggttaataagttaggtgtaaataaagatagttcattattctcatcaatgaaatatgctcaagatgtaattataaatatccaaaataacaatgaatggaatgcaattctcactgcattatctggtggatatgttaaagcaggtttatttgcggatcctgcatatggtgattcaattccaacaggatatgatggatatgcatccgatcctactagaatgccatctgaagcagcatatgaatctgcagtcaatatagtgaatttattgcttgcggattattatgaaaaacatggtaaatggcctgaaatgactgcattaatcttatggggtacagaaatatcaagaactgaaggaattggtgttgcagaatttttatacttcttaggatgtaaaccgaaatgggcagaaaatggtaaagtaattggcgttgaactacttcctttaaaggacttaaaagttaaattacacaatggttctgttgttaacagacctaggattgatgtatatgcaagtttagttacaagtaataaagattggattacttggatggtaactgccactaggttagcggcaaatgctggtgaaagtgaaaatgataattatgttataaaacattataatgaatatcctactcttgatagattatttggtcttccgggcaatattcttgagggtactggtatgagtactcttattccaaatactgctaattggaatatttccacagttaatgtggaaggtatgaatgtttatttggatactgtttcattttcatggactattgatgagaagggtaatatcaatatcactaaacaaaaagatacttacaaatatctccttacaaaaacagagttaataacacaaaacctagatagtacttggagaattttagattctgatgattactatgattggtttgggggattatataatgctgcttcaattttaaggcaaaaagcaggtttaagcagacctgatacttcatttgttgatatccgtgataagaataaatatgttactagaacttatgaggaagagatggagtttgaaatcagaaccactcttttgaatccaaaatatcttaaacctcttaaaggaactgctgcaggtatgaactggattgcttcaagaatgcagaatacattcggtattttgactattagtggtaataagttgaataaggaattaggtaatcaaatgtccaatacccttttagacttagctagtggtgttagagatgcaagtacttcttacggtattcaatctgctattgcgcacatgatttacttagcaactcaaggtacttgggatgcagatagtgaaacccttcagaaactcgctgatgaatatatgagacaagttttaaaatatggtgttgcatgttgtcaccacacttgtaaaaacttggattttaataacaaggtcattcaagtaagttcattaactcctgctcaaaaagcagaatttgcaaaaatattggcacaagctactaatactgatcctttgtatgaggtggaaaaagattccgctaataatgataataatgcacaaggaattgttaatggaactactaaagataaacaatcagattcagaatctggggataaaacatcttttggaggagattcctctcaagcaggtgatgcaaaatctgcttcacaatctcaagattctagtgattcatcaggtgattcaggtgctgatgcatatgagttgtcccaacaatccgcttctaaatctactagtggcgctgaatctagcatgcca

SEQ ID NO: 76472 - DNA, 765 bp, Methanobrevibacter gottschalkii
  source 1..765: mol_type = genomic DNA
gcaaatgattaccaaattgttataacatacggtgaaactacaaaaaacaatgctgaatataagaacactgttgattcattctttgaaaatcaagcacatatggatttaaaaggagtaaattccaaaataatcactgccaatgaagtgaataaaatttcaagtacaataactggaaaaagttataattcaaatcagattttctcatcagcactagttgatttaggagataatgataaccttaaagttagcgtagacaaatcaaaaattaccacaataactggagatatgtatctctccgcattaaaatcagcaggaattacaaatggccatgtatatataacaagtcccgttactgcgactggtgaatctgctttagcgggaattatgaattcatatgaagtagctactgatgttgaaattcccgcaccggttaaagaagctgcaaacaaagagatttatacacaagcggaaattgtaaaagagtcaaatgttagtgccgatgacttatcaaacttggttgatgatgtaaaagaaaccgttaaagaagaaaacattacagattaccagacaatagtaaatataatcaataacactaccattaattacaatatcaatttaacatacaatgatattgaaaaccttgctgaaagtattgaacaaatacaaaatgttcagggagatattaacagttaccagacagaagtaaatgatgtgctaaatactaccgatacatcaaatactggatttttagacgggctattcaac

SEQ ID NO: 76473 - DNA, 24 bp, Methanobrevibacter gottschalkii
  source 1..24: mol_type = genomic DNA
atggaagctattcctacaatacct

SEQ ID NO: 76474 - DNA, 459 bp, Methanobrevibacter gottschalkii
  source 1..459: mol_type = genomic DNA
tatggtattacaaatagcgataatccaatcttttctgacttatccagtatgtcagcaaatgataatgatgctggaaatggaataggaaataatacagttacaggaaatggaagtggaaatacaatagcaaccacatccggttcaggaagtggatccagcagtagttcaagctccggaagcggatcaggttcaggatctggaagtggatccagcagtagttcaagctccggaagcggatcaggttcgggatctggaggaggatccaatagtaactcaagaacacatttatcatattcagaagcaaaaagtattgcaaatgatgctattgaagaagctggatgttatgcaggaagtggatcatattctggaggatactggtactttactgtatatgatgcaaatggtaataatgtagacaccataagtgttaatgacaacactggtgctaccggaagagga

SEQ ID NO: 76475 - DNA, 66 bp, Methanobrevibacter gottschalkii
  source 1..66: mol_type = genomic DNA
ttaaatgtttttcccaatttaaattcaattgttatgtcttctgaatatattaacaattctttattt

SEQ ID NO: 76476 - DNA, 48 bp, Methanobrevibacter gottschalkii
  source 1..48: mol_type = genomic DNA
ttaatggggcctattgctagtttaaatcaagtcactggtcttcatatt

SEQ ID NO: 76477 - DNA, 354 bp, Methanobrevibacter gottschalkii
  source 1..354: mol_type = genomic DNA
aatactgcaatttccattccaagtccagattattcttatgattcatgtgaattcagaactgctcaagatgtcatggaaattctaagcggaaaagtgaattttacagataggacatttattggtgagatatctaaaatcttaaaagataataaaaattcaaaagaatctattaatttagtttcaaaaatttgtaaaaataaatttaaaagtttaaatcttacaaattatagatttactgagaataaaattttaaaagaaaaaatattggactcatcaggtgattattcaaaaagtaatatggtttcagttgctacacgtaattatgatgactattcttatactttatctgtatgg

SEQ ID NO: 76478 - DNA, 33 bp, Methanobrevibacter gottschalkii
  source 1..33: mol_type = genomic DNA
aaaattataccagtatataatataaataaacta

SEQ ID NO: 76479 - DNA, 54 bp, Methanobrevibacter gottschalkii
  source 1..54: mol_type = genomic DNA
gcttgtggagatttaccagataaaaatactgcttcttcatttatgttttatatt

SEQ ID NO: 76480 - DNA, 2736 bp, Methanobrevibacter gottschalkii
  source 1..2736: mol_type = genomic DNA
gataataaaaatgaaacattattaactcaaaaagaaacagattcaagtcaaaaattatgtaagtcaagtgttagtaaggaaacttctaaaaaagaaaaagtcactcttaaagcacctaatttaaaaatgtattataaggatggaagtaaattcaaagcaacagtgaaaaataaaaataaaaaagcaataacaaaagcaaaagtggattttactgttaatggcaaagtttataacaaaaaaactgacagtaaaggtgatgcttaccttacaattagcagtttaaaaagtggaaattatccaattaaaataagatttgctggaacaactaaatacactgcaatatcaaaaaagagcacaattacagttaaaagtacaataaaaagtaatgattttaagaaatactataaaaatacatcgccctacacttctaaattttataatcaaaaaggaaatatattaaaaaataaagccgttaaattcaagttaaataagaaacattacactgttaaaacagacaaaaagggtgttggaaaattaccgattaatttaaaacctggaacatacgccatatccattataaatccaaagacatctgaaactgtaaataaaaaaataactataaaaagtttaattaaaactaaagatttaagcattaatgggcaaaatgatggtaaatttaatgtaaaagtatttaataataaaggcgaagtttatccaaatcaaaaagttacatttaagattaacggaaaaacatattcaaaaaaaactaataaaaatggcattgcaacattagacatcaatttagatgttgggaaacactcaataacaaccgaatatatgggtcttaaaaatactaataaaatcaacataaataaaatagtgaaatcaaccaattatatccatacaacattaattccaaattatgttaatgttacagcaaaatatgtggttaataactctgtttactgtcttaaatctggaatcaacggcatcataaaaatgccaaaaaatgaaatatttaaaattcaagttgggggaaaaatttacacatttacaacaacttcaattaacggaataaattccataactcttagatacaataataattatctagtgccctttgatgggagtggagtaaaaagttatacaaaccgaaacaagttaacctcagatggaataattattagcaaagtaaatgattacacacaaattgactatcagagtaaaacaaaagataatacagctttatttggattttatgcaagtaaaggattagataaaagtgaaacattaacatatgtggaaaatgataaaataactgcaaaaattaacttcaacacattgagttttgatgaattcagcttacgatacagtttatctgcattgcatggaaaaacaatttataatttcaattatggaaattacaatgacacaattagatttgcaaacaccaacactcccgtaacatttagttattttggaaattcaatagtaggatatgcctcacaagaaaccattataactaaatttaaagttgatgaaattaaagaagtagaaaaagaagagaatataagttacggccttaataaaaaatatagaactgcaatgggatttgaagttctgcaatcatatactctgattaatgaaaaaataaatcaaaaaactttagagaattgggttttaaaaaatccggactatttaagtagatttggagtaatgaatatttatggaatgcatttagcatctcttgaagtagcttggattgcagatataatagcagataagagctccaaagaattaaatgtgaattggaaaagaaacaataccctaacaatattaggtggaataaacttagaagacacttatttaaatatactaaatgcagacatgggtatgaaagtaacaggcaaatttgacaatgcattcctattcaaattattaaattcaatgaatttaccaaatattgaggaatatgcattattgaaagttgcatatagatacttggataaaagttcaaactcattagataatgtatttttatccattctaaaaaacaactttagtattgcacaattagatgacatgatttacatattttcagaagcaaattcaaaatctgcaattatattaaatacaagcagcggagtttcaagtgtagttctagctcaaaactccgtttataaaggatcatcacttaaaaccacacatgactgttgcggtgttggaattataccaaaagacataataaaaggaattaaagaaacatttaacattattaataatggattatcaaacatataccccaataagacacatccaattagtaaattattttatatggctgcaaatttacttgccaaaccattaaatggggttggatcattaggtatgaatttaattacaacaatggcacttatacaaagtggaggaacaacatatagaaacgaaatggttgaaaaaagtgattggcatgaagttatggataaaattacttttacaagaccaggatatttacaatcaaaaaaaatttacaatattccgaatgaaaaaggaggatgtgattttattgaagtaaaaatcagagatgatatgacattagatcgcaataatgcaatctatataagtgatgggaaaacaagaaaattaagtaaaacagagacttacaaatatttcattgatgactactggacaccatttagtatgcctcaaaaatattgggataaaagttggaacagg

SEQ ID NO: 76481 - DNA, 42 bp, Methanobrevibacter gottschalkii
  source 1..42: mol_type = genomic DNA
ccatatttggcttatggttatttggggaaacctgaagcttta

SEQ ID NO: 76482 - DNA, 36 bp, Methanobrevibacter gottschalkii
  source 1..36: mol_type = genomic DNA
ggtaaatttttaacatttgatgacattggatttttc

SEQ ID NO: 76483 - DNA, 54 bp, Methanobrevibacter gottschalkii
  source 1..54: mol_type = genomic DNA
gaacctactttaagagttctctactttaaaaatcctgcttatgtggctggagca

SEQ ID NO: 76484 - DNA, 210 bp, Methanobrevibacter gottschalkii
  source 1..210: mol_type = genomic DNA
tggaacatgcagaatattgtatttaatgaaaatatggatgaacaacaaaaagaaaaagtgaaaaatgcaataaaagaggtttcacaaattgaccagggcaatgaattaaatgatactccggatataagtaaatcttctggaaaaggttttactgaaatgggtaaagtttatcgagattctgacacgggtaaattaatcatggttgaaggt

SEQ ID NO: 76485 - DNA, 63 bp, Methanobrevibacter gottschalkii
  source 1..63: mol_type = genomic DNA
atggtggctattcctgggagtgagtttttaactgctgctttaaatgtagtttctcaaagttta

SEQ ID NO: 76486 - DNA, 51 bp, Methanobrevibacter gottschalkii
  source 1..51: mol_type = genomic DNA
cccggtcttgcagcattaggtaatggggatgtttcaacattggctgctgct

SEQ ID NO: 76487 - DNA, 33 bp, Methanobrevibacter gottschalkii
  source 1..33: mol_type = genomic DNA
aaaattcagttaaattcaattataggtagttat

SEQ ID NO: 76488 - DNA, 57 bp, Methanobrevibacter gottschalkii
  source 1..57: mol_type = genomic DNA
aatatcatctctttgaatatgggggatatgaaacctataaatattgtttcaattgat

SEQ ID NO: 76489 - DNA, 372 bp, Methanobrevibacter gottschalkii
  source 1..372: mol_type = genomic DNA
gctcatcctggtcatggttctgagtatgtggaagaagtgacttctgatgatgttggttcatcaagtaattccggatcttcttcaggtagttctggttcttcaagtaactctggtggttctaccgttccagcttcatcttcttctagtagctctagttcttcacgtagttctagttattctagttctgacccttattctagtagctctagttcttcaggagctcatgattcaaaccatgattcatatcaaggttcatcatctaattctgttgtaaaagataattcttctcttaaagatgcaaataaaacaaatgaaaatttaactaatgattcaggtgaaattgataatgatgaattatttacagtaaacaat

SEQ ID NO: 76490 - DNA, 2829 bp, Methanobrevibacter gottschalkii
  source 1..2829: mol_type = genomic DNA
gaagatatcggtaattcagatgtttttgaaaatccaatctctacggatattcagcaagatgatttatctgaagatgatttggatatatctaatttaaatgttaaagttaattatcaatatgctgatgataatggaaaaataaatcctactattaaagttaatgataaacatattatatcaaaagaatttaatagttcatatcaaaattataatgttataattaattctacaaatattgcagataaacttaatatttctatttctgcaccgggatatttgactcaatataaaatagtcactccaaacatgggtaaatctattttggctaatgtcacttttaatatggaatcttctgaaagttacaaattaggtagagatgtaactgcggaagcagataaattacttgattttaaaaatgctgatgatgttttagctattacaactgctggtgttgcaaaatataatggtaagactagtgaagatgcaatggaagcaatggttaattatggaaaaatatcttatagcaatatattaatgttacgtcaaagtgctattgatcctattgattttgcttttattgttaagaaaggaaatgagttaaaagctatcattttccaaaatgcatctactaaatattcatatttgggaactatttctgagaacatgacaaaagctcaatggaataaatattataagtcacttgttggtgaaaattcctgggcatttgctagcttggcaaatggttgggctgctggtgtttctagagaaattcttcaagaagccgcttttcatggccatatttgtgaaggtactttgggtggatatagtattattcaagctttgttgaaatactatccgcctgagcaagaaaataatcctggtggaattggttctcctgcagatattactgcttataaagtactcggagttcctggcggatcggatgatgatgcagcattattctttttagatgatacaattggtaaaactggttatgctggtatgaataccactaatactggggctactgagaatatgattggttttattaaatggaattccaaacaaaagactggtgatttaattatcatgtcatttaattccactaaacttaaaaaacttttcaaaaaagaaactaaaataaatgctgatgctggaagtttggaagaattaaaatactgctcttggtggattaataaaattaataataatcctgaaaaattagttgattttttatatgaatttacaggtttaaatcaagaacaatataattacttgatgggaactactgaaaatataacttatgatggtgaacctgcagagtatggtcttgatggtcatggtttagatttaaactatattttatctttaaatctccccactgctaaaagaacaatcaatagtgttgctcatgctaaattaactgatgctgaacttaaacaaattggtattgatgcagccaataaagctaaaaaaatattcaatgaagaattgggtgttgaaattgatagggatgatattgattttctagctttaactgatgcaggatatgcatttttaaatggccaagatactgtagttgttcgtgatggtcttcatgaagtccttggaggaacattatatagtcaaaatttattaagtcttcaccaagctgtatggaaaccgttgtggtttgcatttgcaattcgttatccggattctgatttagttgatatgatttatttaagatataatccagatactaaagatttctttgttggaactcttgatggtaatagagttgtggatattggttttgaaacattaaataatagtgataaattaaaagctattgcaaaatcttttgttcctgatggaaattggtttaatattcaaagtattgtaaacgcatggaatgaacatcctttatttgatcagatggctactttcttgtatcatgctcatgtatgtcctggcgttcaaccaggtttctttataactgattatattcaggaaaaatatccattaggtgaaaatgaatcttacacttacattgcatctagtatttattgtaaagatgacagtttaacttatctattggatttatctccaggtttaggtactttttatgtacaaaaattaccaaaaaatgaaactgaaaatggaatatctcaaggtgttcttgtcgtatgggataaaaatcttaaaataggtaaggcagtaattgttaattttgatgattggggtacaattgacacaagtatgtatgtaactagtgaagcaaaacgtgctagtcaaattaaagcttatattgacatatatggtaataggaacaatccaaatgttaaatctaaaccaattgtctcaaccgtaaatgaaaaatggattactgaagaacaatttaacatgttaaaacaaggtgctggtgatgattttaatgtactttcatacttgaaaagccttgatgatatcactaaagaagatttattaaaatcaataaatcaaaattccaatagtaattcaaattcaaactctaagcctaacattaaccctaatagtaattcaaattccaattctaacagtagttcaaatgctatagcatctcatacaaattccaatccttcatcttctggaagtgttggaacttctggtgcagtagtttctagtgcatatgttggcgagtttactaaagatgctgaatctgaagattcacaaaacggtcctgatgatgcaaaatcatatgaggtatctaaatctcctgcagcaaaatctgctgattcaaatagtttaatttatgctttaattggtgtattggctattggaattttgcttggtgtaggttatatgaaa

SEQ ID NO: 76491 - DNA, 33 bp, Methanobrevibacter gottschalkii
  source 1..33: mol_type = genomic DNA
tcaatcccatcaccgcttggagtgccaatccac

SEQ ID NO: 76492 - DNA, 351 bp, Methanobrevibacter gottschalkii
  source 1..351: mol_type = genomic DNA
tcacatggagtagatgtaacagcagacaccatggttgttgctaatgacagcaatggaaaaatggtcaaaagtattgcagaatcaaataatattaacattagcgtttataaattcacatctgaagatgaagttacacatatccttgaacatagtataaacaacacaaacaaaagaatattgtttactgcatatcaagagactgctaatgattttttaaaaaagcatcctgacatgtccaatagaataattgtaatagacaatgtaaacgacaatacaactcttgaaggacttcaaaatattatgaatgtgcccgtagaaaatgtaaatagtgaaaataattttggattgcca

SEQ ID NO: 76493 - DNA, 33 bp, Methanobrevibacter gottschalkii
  source 1..33: mol_type = genomic DNA
tcgtttgactacagatttgaagatcctctcaac

SEQ ID NO: 76494 - DNA, 54 bp, Methanobrevibacter gottschalkii
  source 1..54: mol_type = genomic DNA
attggaggtattcctctttttaatagtgttttaaagtcaaattcaacaacaaat

SEQ ID NO: 76495 - DNA, 240 bp, Methanobrevibacter gottschalkii
  source 1..240: mol_type = genomic DNA
tcccaatcaatagctaatcagcattggacattgaatcctggtcaattagtactgtatagagcagcatttaccctagaagtttttgaaaaaataattccccttgccggttcaacaaatggacatattttaagtatgattttctcatctggaagccccagaacatttataggcgaatatgtcctgcactacaatgtttgccttacttcaacattattcggaccagttacccttgatttcgga

SEQ ID NO: 76496 - DNA, 57 bp, Methanobrevibacter gottschalkii
  source 1..57: mol_type = genomic DNA
gcacttccagaattacagataacatattattccacatttttgtcatttttttcaagt

SEQ ID NO: 76497 - DNA, 33 bp, Methanobrevibacter gottschalkii
  source 1..33: mol_type = genomic DNA
gtagcaggacttggtgcagatccattagctgca

SEQ ID NO: 76498 - DNA, 45 bp, Methanobrevibacter gottschalkii
  source 1..45: mol_type = genomic DNA
ttaattgttatgggagcatcagctgttttaaaatacgcaatggat

SEQ ID NO: 76499 - DNA, 33 bp, Methanobrevibacter gottschalkii
  source 1..33: mol_type = genomic DNA
acaattgtatcaggacctgttgcagtagctgtt

SEQ ID NO: 76500 - DNA, 63 bp, Methanobrevibacter gottschalkii
  source 1..63: mol_type = genomic DNA
caaattgcattcatattttcatattctgaaagtagtgctcaattagaaccattaattgcaagt

SEQ ID NO: 76501 - DNA, 357 bp, Methanobrevibacter gottschalkii
  source 1..357: mol_type = genomic DNA
caacatcttaatgttgttgtatctggaagtatggaacctgccttttataggggtgacattgttttagttgaaaaagcagatttctttggtattcatgagtttaatgcaagtgatgtcaaagttggtgatgtagttgtttatgatgcagcttggtataaccagccagttatccatagaattattaatattacagatattaatggaactacgatgtatgtaattaaaggagataataataatgctcctgacccatattatgttacttcaagtcaaataaaagaaaaagtagtaacagttgatgataatttagtcgtaattccaaaaattggttatctttccctttggttaagagggtta

SEQ ID NO: 76502 - DNA, 1098 bp, Methanobrevibacter gottschalkii
  source 1..1098: mol_type = genomic DNA
gcaaattggaattcatttgctggtggagttgatcacaatgcatttagagaagaaagttcggattttgtaactaatctttggacttttaatatggaatcacctattcattcatctcctgcagtttataaagattttatttatgtggtttctacccagggtattttgaaagttattaatatggaaacaggagaaaaagattgggattttgatttagaatcaaatactaattcttcaccaataattaactcaaataaattattcattggaactgaagatggtattaaagctattaatataaataatcataatgaaatatgggattatgattgtgatgatgttgaatctactccctttttatataaagatacaatttactttggaagtgatgatggtcatttatacggacttgataaggataatggaaaagttgtatttaataaaaaattagatggagaacttaaatcctccccaattgtagttgatgatacaatttatattggatctacaaactgtaagttgtatagtatcggaactgacaaagataaaaattgggaattcactactggtgatgaaattttatcttctcctagttttatcaatgacactattgttttcggatcaaatgacggcaatatttattgtttaaatgaatcggatggtgccttaaattggaaagttgatttaaataataaagttctatcttcacctactgttgataatcatgacaataatatttttataggttctgatgaaggtaatttaacttgtattgataatagggatgggactataaaatggagtcattcagttggtggtaaaatacaatcaactcctgccattaaggataatttagttgtttttggttcggataatggtaatctgtatgttttgaataaatatactggtagtgaagaatttacatataatccaggaacaatattatttaattcagctattaattcatcacctgtaattaatggtaacagtttgatatttggagatgattctggcaatgtatattctttaaatattgataaacatgaggtaccgggatcaactcaaatgtatttttccatttctgttttaataattattgtt

SEQ ID NO: 76503 - DNA, 450 bp, Methanobrevibacter gottschalkii
  source 1..450: mol_type = genomic DNA
ggaatgggtggcgaaatgacagatttaccaattcttgttgtttcacaaagtcatggtaatttaacagatttaacattagatactattaaaacaactgaaacttataaggttattgaggttattgatgatttggatgagggtaaaaaacgtgttgattcgggtgaagttaaagcagctataatactgccatctgattatgacgataattcaacacaacaaaaatcggttactttgtatttggattcatcagatcaaatggcttctcagattttagattcatcaacacaagctatattctctagactctcaaatatggttgcttcccaaactaatgttgaaaataaagatgctaatattaatccatcaatatcaaattcatttaataactttaaagatgatattagcttacatattaatagaatttatggtaatattaagtatattgacttt

SEQ ID NO: 76504 - DNA, 114 bp, Methanobrevibacter gottschalkii
  source 1..114: mol_type = genomic DNA
tatcctattgaaacaatgccatggattctacagaaattagcatatatattccctcttacttatttaaatgatgcaatgaggggaattatgcttaaaggtcaaacattaggggat

SEQ ID NO: 76505 - DNA, 60 bp, Methanobrevibacter gottschalkii
  source 1..60: mol_type = genomic DNA
atggtgtataatgaattaataaataatataaatttaataaatataaataatattatttca

SEQ ID NO: 76506 - DNA, 426 bp, Methanobrevibacter gottschalkii
  source 1..426: mol_type = genomic DNA
agttcatatactattgtcactgctgaagctcctaatattcaaggattaattgacatgcaaatacaaaaaatatcttctattttaaatcctgaaactgttaatgaagctttaataaaagatccaactccaatcaatattactaataaaaaagatgttgcactcaaaatgcaagacttgtctaaggttgatggtgttaatgttgattcaatgaatatatctacacgtgataatccaagtaatgataaaaattttactgtaattattgaagctttaggctatgcttcccctaattcaacttcaggacaaattattattagtcaagaaccatcttataagattatagcttctgcacctgcatcttatagaggtgaaggaataatggctgatacaaattcaatgacaataacttcagttttaaaattatat

SEQ ID NO: 76507 - DNA, 36 bp, Methanobrevibacter gottschalkii
  source 1..36: mol_type = genomic DNA
atgacttttttccttgagtcttttccaggtttgttg

SEQ ID NO: 76508 - DNA, 39 bp, Methanobrevibacter gottschalkii
  source 1..39: mol_type = genomic DNA
agttctgttgaaacattacttagtaatcctagtttactt

SEQ ID NO: 76509 - DNA, 39 bp, Methanobrevibacter gottschalkii
  source 1..39: mol_type = genomic DNA
tcaatttcatttggaacaattggtgttggttttgataaa

SEQ ID NO: 76510 - DNA, 783 bp, Methanobrevibacter gottschalkii
  source 1..783: mol_type = genomic DNA
tcctatgagaatataacagataaactaattaaaacacaagaaaaagaaaatatggaaatattaacctctgagattgttgataacttaatcaacaatcctggagtaccagaaaaatggtttgaatatggtaaaggaacacctggacttgcaattataaatgagggtggtgaaattattccaaatagcgtttcatattcaaagttaatctcgcttaaagaaaattataaaaaacttgttgatgatcagttattcaaatctaaatttcattcatcaatggaattaatccctcaaaagagaactatttcaagtgtaaaaattggttctaatagtgaatcaaataatatattttcagttaatagattggtaaaatgtgatttttacaaaaaatatgttttaaaagactttaaaaatgatggaaaatgtaatcacaatcatgaccaaaaatatcatagttgtaattattttaaaatttttaaaggaaatctaaaaaattcagattactatttattaatcgaggatagtgaaaagtatgatttaaaatatattgttgatacaacaagagttgttaaagaaaaatattgggaaaatgcaatatcaaataaaatttatttaaatgataaaattaatttttatgatgatacaagtgcaatcgtatttattcattttaacaaaccacaatctaaggttgttttagtaagtgttcctaaaaattttgataaaaataaattaaattatgattattttataacaaacgaatgtcaatttgttctaaaagtatggtat

SEQ ID NO: 76511 - DNA, 849 bp, Methanobrevibacter gottschalkii
  source 1..849: mol_type = genomic DNA
acatctataaattatattcaaaataaaaatatcggcattgaaagtaacgataatttcaaatatattattgatgattatacacaaaacttagaacttaattgcagagacgcaattgatgaagcaacccaaaaagtttttaacggacttcctgtgacaaacagtgaaaaccaaattaaaaagaacttaaataaaattttagataaaaaaaataaagaatatgaagaaaaatacgacgtaaaaattaattctgaaacattgtctgttgaaaataccaaatcaccatggaaaatactttttaaaattaaattaaacatcaaaaagggtgatgaaaaatattctaaaatagttgaaaaaaatgcatctgttgaaggtttaagagaccccttaccaatagctaaactaaccattatgtctggaattctaacttatgataatcaaattcattataaaactgcattatctacatatatgttattacatcatttagattcgccagaatcatatattgaagcaacagcaccattatacattaaaaaatgcccatatgatccatatatccatcatggagaccctggagtaattgaagactgtcttaaacatggatattttcatgaaagtgcagatggaagttgttatttatgtagattagaaggaaagggaaaatgtcctcattatggtttagaagtattcatacaaactcatacacctctaaaaaatgagtctttatcttgcccagatcacgttgtatttgcagaccattataacggtgaaaaaataaatccagatgattggaatagcctgattttagattcatctcatagaaagaaatacgggttgataaatgatgga

SEQ ID NO: 76512 - DNA, 75 bp, Methanobrevibacter gottschalkii
  source 1..75: mol_type = genomic DNA
gcatataatgaggaagagactgtggccaaggttgtaaatgtagttaaaaaagtatcctttgttgatgagattata

SEQ ID NO: 76513 - DNA, 93 bp, Methanobrevibacter gottschalkii
  source 1..93: mol_type = genomic DNA
aatgatggttcatctgataatactgaaatggaagctttaaaagctggagctattgtaattaatcatgaggttaataaaggaaaaggagaagct

SEQ ID NO: 76514 - DNA, 99 bp, Methanobrevibacter gottschalkii
  source 1..99: mol_type = genomic DNA
tataatttgacatcaagtaaagttgaatcaatgattaaacctattttggatggtggagctgatattactaaaactaaattctctagagcaagcggacgt

SEQ ID NO: 76515 - DNA, 141 bp, Methanobrevibacter gottschalkii
  source 1..141: mol_type = genomic DNA
ggaatttcaattatggaagttgatattggagctattgaacatgacatgtctccactttctgatttaaatttaatggctaatgaagttgtaagaactattataggtcgtgcaaataagtacggaagagttacaatgattgat

SEQ ID NO: 76516 - DNA, 681 bp, Methanobrevibacter gottschalkii
  source 1..681: mol_type = genomic DNA
ctcggtgcagcacattttgatcatggagttttatcaattgaacccaattctagaaatctaattatttatgctgatgattctccaagggatactatctctgttagaggaccatatactattgatactgcaattgaaaatgaatctggtcaaatacgtatgccttctgatgctatgatgacattaggagtcaatattaatgatacgattaaattaggtgcgaatacttataaagtcaatgaaaccagattaggggagcctgatattttaaggttacctattgaagttaaaaagctattgcaagttgaaaatggtgaagttattcaaaacagtcgtttaaaagatgtttttgatggttctttaattactcatgcttatgaatataataatacaacaattaaagaaaaatattttattacatcaaatgaaaaacaatcatctacatatgaaatatttttggataatgaatctattgtgaattcatatggtacttttaaggataacggaacttatgatatttctgtagatgggaattatctaacttcttttagttataaaaataatttgactaaatcatttaaatttgacggtcatgatttagaaattgtatttagggatacaaattccacttcaattaaacaattttctagtggaaatcaaggtgttttcttaaattttaatttt

SEQ ID NO: 76517 - DNA, 378 bp, Methanobrevibacter gottschalkii
  source 1..378: mol_type = genomic DNA
ggattttttgatttcttacattgggatgacgattcagataatattaatgtagttgaggatggccaatattgcacagtgaatcaggtttcagcttatattaaagaatttcataaacttccaagtaattatataactaaaaaagaggctcaaagtttaggttggcatggcgggccacttaaaaaatacgctccaggaaaaagtataggtggagatacatttactaataggcagcatatacttccagatagtgattataaatacattgaatgtgatataaatgctaatggaacatttcgtggtgctgaaaggattgtttacaatactggcaactataaagtatactatactgatgatcattacaacacatttacagaggta

SEQ ID NO: 76518 - DNA, 60 bp, Methanobrevibacter gottschalkii
  source 1..60: mol_type = genomic DNA
atgattattgtatacggtaaatattcaatatatttattgggaggaatggaaatgttagaa

SEQ ID NO: 76519 - DNA, 45 bp, Methanobrevibacter gottschalkii
  source 1..45: mol_type = genomic DNA
aaaactactctatttggtccaattggaggacatttaggctttttt

SEQ ID NO: 76520 - DNA, 33 bp, Methanobrevibacter gottschalkii
  source 1..33: mol_type = genomic DNA
tacaatgcagatttatcatcacttccaaaatta

SEQ ID NO: 76521 - DNA, 51 bp, Methanobrevibacter gottschalkii
  source 1..51: mol_type = genomic DNA
ggactagttgatttacagtataatgtttcaattattgaagcggcaatgcct

SEQ ID NO: 76522 - DNA, 84 bp, Methanobrevibacter gottschalkii
  source 1..84: mol_type = genomic DNA
tccataccatctatttttgaaactccttctgtttcgattttaattcctggtgttgacattccaggttctcagatttatgttcca

SEQ ID NO: 76523 - DNA, 324 bp, Methanobrevibacter gottschalkii
  source 1..324: mol_type = genomic DNA
attggtattccacattactttgcagaagatgggatttctatcgataggattgtttctgattctccttctgagggaatactaaaagagggtatgattttacaagctattgataatcataaaattaatgattctgaatcatatgtcaatattgttaaatcttttaaacccggggataatgtaacggttcaaacgaatcaaggcagttattctgtagtgttaagtaaaaatccaaataacgattctgttggattttttggaattcaagcagctaagcattatgtgttattaaatgatagtttaggaccgataccttggatattattt

SEQ ID NO: 76524 - DNA, 45 bp, Methanobrevibacter gottschalkii
  source 1..45: mol_type = genomic DNA
tcccgtagtgatagagtaatagacaatgttgtatctggtgagact

SEQ ID NO: 76525 - DNA, 39 bp, Methanobrevibacter gottschalkii
  source 1..39: mol_type = genomic DNA
gttccaactttagcttctgaatttggaatgagcaatatt

SEQ ID NO: 76526 - DNA, 33 bp, Methanobrevibacter gottschalkii
  source 1..33: mol_type = genomic DNA
tatcatttgcaatatattagaggttatgattct

SEQ ID NO: 76527 - DNA, 54 bp, Methanobrevibacter gottschalkii
  source 1..54: mol_type = genomic DNA
gtgatgggtaatgtaccaatgattgagaaatattttcctcttttaattactagt

SEQ ID NO: 76528 - DNA, 90 bp, Methanobrevibacter gottschalkii
  source 1..90: mol_type = genomic DNA
ggcggtttatgtcctactgacgcatccgtacctgcatatgctattactgctaaagctattgcagtagcagaaggtaaagtaactatgcct

SEQ ID NO: 76529 - DNA, 33 bp, Methanobrevibacter gottschalkii
  source 1..33: mol_type = genomic DNA
ttcttaggagctaaaggtgtaacctggactact

SEQ ID NO: 76530 - DNA, 54 bp, Methanobrevibacter gottschalkii
  source 1..54: mol_type = genomic DNA
tgtaacgctttagcattccctgtatctactggtccgggttccagaatggcacat

SEQ ID NO: 76531 - DNA, 285 bp, Methanobrevibacter gottschalkii
  source 1..285: mol_type = genomic DNA
cctgctgctgatttacctttaattactgatgaagctaaaggagaatatgttgattcttcaggtcttccttatttcagtgaaatggattcatattataacttaaggttgactgaagattatattgatcatggttatgttggtgatcaaataataaatggtagtgagtgggatatgcacaggtatgctcctactggtaatcagattaattatgaactaggtattgtgtatgtaacttctttcttgcatgatatctttggaggagatcactcagttagagaaatagca

SEQ ID NO: 76532 - DNA, 174 bp, Methanobrevibacter gottschalkii
  source 1..174: mol_type = genomic DNA
gggttagatggtgtaactggattattcggaagcttactttcattactttcattacaatccgcttccagagttgttggcggtttccctaatgtacttgtttctgttgcagagatgcaaattccatccatgcttggaagcggtatgaattcattatttttagctaacactaatggt

SEQ ID NO: 76533 - DNA, 1008 bp, Methanobrevibacter gottschalkii
  source 1..1008: mol_type = genomic DNA
ttaacttctgaatctgttgttccaggcacaagcgattcaatgtggaatgcaatgacttgggttaatgaaactcagagtgatgatactgtattgacatcttggtgggactttggttacctctttgagattgctgcagataaacaagtaacattcgatggaggttcacaatctggagatcgtgcattttggcttggccaggccatgacaacggataatctggaattgtctgcaggtatatttagaatgcttgatacaacaggtgataaagctgttgaatcattagtgaatattaccgaggataccggtaaatcagttgatattttaattgatattttaccaatgaaatcagatgatgctcaaaaaacattacaaagtaagtatcacttaacagcggctcaagcaaatgaggtagtccaatattcacaccctaaaaatccacgtcctgtaatatttgtcgcatcttctgatatgcttcaaaaagctggctggtggagttacttcggtgcttggaactttacaaaccaaagctctgaaaactacaattactatgttccaacagagcaggtaaaagttaatccgggttcaactggtaaactggcattacttgatgatcagggtatgactgtaaatgctgtaatccaaagaggctctggcaacaattcaactactgcatatactgaagctgtttatactgatagtggaaaacagattatggtaaatgatactccatacaatccattgaatatttcaaacttaatggttattgaagatggatatgtcatgaagaatcagtctgttggaaatgtaaaagatgcaaactacacactccttttaattggtgaaaagaatcaatacactccaattttaatgagtaatgagctagcgaactcaatgtttactagattatacttatatggtggagccggtcaaaacatttttgaaaatgtccatacggaaaatggagtgatgttgtttaaagtaaactttaataatacggctgctggtgct

SEQ ID NO: 76534 - DNA, 6153 bp, Methanobrevibacter gottschalkii
  source 1..6153: mol_type = genomic DNA
aatactactaatagttcagatatttacataagtaatgagggtagtgatttttgtggagacgggtctattgataatccctatcaaactcttaactacacaattgggaaagtctcaaacaattcaaatatttatttaaaaagcggaacatataattctacaggttatgatattgtaaataaatcaatttctattaatggtattggtgatgttactattgatggattaaatggatttatttcacaaagtatttttaaaattaactctaatgcatcattatttttaaacaatattaaatttaaaaatggatattgtgatttagacaatgaaactccttcttgtattataaatcaaggacgattgtttattacaaattccacatttgataattttaaaacaagcgttggagtaattactaatgaaaattatttatgcatcagcaatgtcaaaacaagtaatttgtctaattctcagttattttcagctccatataaatataacattcctattcaatttatttacaatatatggtgttgtgatatttataattcatctattggcgcatcgtataataataaaaacatgactctaacaaattcatttatagagcgatttgtttcaaataaggattattcaaatcaaacttcttatgcttactttaataattcaaatgttcatttaataacagctaatgattgtgacatgttaatttttaataatacttatattaattgttattttgatgttgatgatacaactcatacaattgaatattcaaatttaatttgggataatgtaacactctcaaaatataatgatttattttatttttctttaaaaattggttattctaatttaacagctatttcatcatattttttaacttctattttatttttatcttctaatgcaacaatttcatattcatgtattttatctaatattattactgctgtcgtttctaatgtaaatgttaattataattggtggggggataataaaggacctaatgtaatgaatggtgagttttcaaaaatcacttcaaattattgggtagtaatgatggcggattatgatgattctttagttaaaatagatttaagtaaatatacaaatggcttagatgtatggaatttaaataatccctctaaattaagaactcgtttagttaaattaagaacagaaactggtaatttaacaaaaacttcaggttatttggaaaatgctactttttactctgaattaaatggaaataacattaatactatgctttatgcgatggttgataatcaagttttaagaattgttgttggtgagggtaattctgattatgatttatatatttcagatactgaaggtaatgattatttttgtgatggatctttagagaatccatataaaacacttaaaaaagttgtttcaaaagccattagtggaaataaaatttatatattgccgggatattatactttaagttggaatgccaatattaaaatattaaaaaatttaacatttattggtattggaaatgcaacattatcaagatcaaatgctcgaaatatttttattgttcaagaaaaaggtgtgttgaatatcgaaaatctcacatttacacaagctacttctggatatcacaactactatgatccaataattcatgtaattgatggtgatgtaaatcttaagaattctaacttttataacattacaacttatggggttgttttttcagataaatctgaacatgtgactgttaataacttaactcttctaaatgttgaaggtcctgttgtagtgggtaattctactaaggtttcaatttataattctaaatttttcaatggaagtgaagcatccttttatgattcatattattcatttttaatcccagtttgttctaacttgtctgttgtaaattgtactgttgatggatataaaggtggtttaattaaactaaatcctagatatgaacaaatagctgcaaggtcatatatttataattcaacatttttaagaaattatcagtataattatgtttatgctcctatggtttcaacatattcatataattacatgacaggattttcaataattgaaaactgcacgttttgtaataacattgggaatttagtttttagtaatataataaataattgtacatttgtaagcaataaaaggattcgttatgaggaaactaacatacattacaatgtaaattatccaaaagctctaatttatgcaaaaataattattaattctaattttaataataattctttcatctctaaaaattatgaagacatggtcattcatggcgatgaagtttattattcaacctttataaataattctgcagcatttggaggtgcattatctggttcaaaagagatacattattcaatatttataaataattctgcagcatttggaggtaatgatgtatttgtttataatggggatttaaattgttctagcaactggtgggggtcaaatcaaaagccagattcatctagggtttttgttttcatcggaacattggtattggatgattgggttatattgactatggattataagaatgatagggttattgcatatctggataatttattagacaataatggaaacagttatcctttaaatcatgttttaccatctagggctgttattttttcaactgaaggtggagaattaactccatctaatacttttttggttaataataaagcttcaacttttttaattagattaacttctagcgattttaatgtatttgctcaagtcgataatcaaattacaagtttgactgtttataataacactactcaaatattaatgagtaatgttgtaatatatgggaaagatgtattgtataatttgtctttgataaatattaatggacataaaatttcaaatcaggatttaaatgttataattactcacaaaaattcaattattgattcatttattgtcaccacagataaaagtggggatgcatcatttagtgtagattacgcaatcggtatttatcaggttaatgttgtatatttaggaaatggttattttgaagaatgtaactcttcagctactataaatgtatcttctattaaaactaaacttcaatcttataaccaaacatattcaggtaaaaataataaattttatgcaatattggtcgattatcatggaagatatttgttaaatagggatttaattttaagaatatttgatttaaatgataatttagttaacacagttgatgttaaaacaggtgttggtggaagagcagacgtgttattatctttagatgtgggaaattataaaatgaaatgggattatctgggaaatgaatggtatgaaaagagcacttgtatatcatttgttacaataagacctattgaaactaatatcatacttccaaacacaacattatatggaaaaggaaatgattatgagttcacatttaaagatatgtatggaaatttaatttctaatgaaatgattacctttaaaatatcaaaagaaaatgaatctagtaaatttagtcttataaccaagaaaggaattgcatcaataaatattaatctacttccaggaaaatatgatttagaagcggtgtatgcaggtgataaagtctatggttcttcatttgcttctgcaattttatatgttgaaccaatttttgtaacaatgaatcacaattcttatcaatccctacctaaaaatggtgttttcactgttattttaaaagatatgtatggaactaaagtaagcggtgaaaatctatctcttgaattaattaacaaagatattcataaagtttatgaggctgtaagtgatgctagtggtcaagcaaatttcaaattagatgctcctgaaggagtttattttgcgttaattaattatggaggtaatatttggtatggttcttcagttagtgctgtgactattgaaataaattctaatgtgcctattaatccagtttatattaatggttctaatttagtacaatattacggtgaagataaatattatttaataaagtttaatgatacaaatgcatattcattagaaggaaaacttgtaaatgttttaatcaactctgaagattggtctaactcatatactcttgaaagcaatgtctttggtgaagctagaattcaaatagctttggaacctggaacttataatattacttataattataaaaatgaatattatggtttatttgctcaaaattcaagtactatatttgtttataaaatgcctacaagcttaatagcatcaaacatgattttaaagaaaggcgattcaaaaaatttagaagttaaacttgtaaataaaaatggagatccaattgctaacctcccagtaattattaagatagatgataatgagtataatataactactaatcaaaaaggaattgctaaattacttcttaatttagatttgggcacacataatgttacatattcatttaataataaaaattacatatcttcaaaaggtaatgtaactattttagttgttaatgactcgaaaaaaacaacaacacttgtaggtaatgatgtttatactcgtgaagatcaaacaataaattatactgttttattatctgatttattggataatccaatttcatcttctgaaattgttttaaaaattattaattcagatgatattaatataaaaacatataaaggatatacagatgtaaatggtgttgctacatttaagtttaatttaaaatttggtaactattttgttaatgcttattataatggaaatagtgtaaatttacctagtttcactactaataatctctacattaaagttttagaaaattacacagagacaatattatttggaaatgatattgaaattcataatggtggagatgattactattcagttgttttatctactgttgatggtgaatttattaaaaatcaaataatcgaatttataattaaaaataattcttattttacaaatacagacgaaaatgggatagcatatttaaaaataccattttctccaggttcttatgaagtattaactaaatttcatggttgcgataatttaaccagttcatcaattcacaattatatttcaatttatggagatttatttaatttttactcaaaagatgttgttaaagcatataacaatggtacacattattatgttgcattatatgatacaaacaatgaacctttgtccaataaaacaattaatttctatgtaaataatcagacatatcaggatgttacaaatgctgatggttttgtttgttttgaagtatggttaaatccaggaaaatatatcattaatgcaacttttaaaggcgaatatcctgatgaatttacaagtgttgtaaataacatcacagtcttaccaacaattatgggggaaaacttagatgtttattataatgaaaatacagtattttcactatttttattagattataattgtaaaccattagaaaatacagaagtagtaataacaattggtggagctaaatattctacgatatctacttttggttcagcaagttggaaattaaaattaaatgcaggggtatataatgttatttgtaagaatcctataacaacagaaaaaataactcgtaaaattaatattaaatccacaataatatctaaaaatttggtaaaatattataaagggtcttctaaattttcagtaacatttaaagatcgcttcggtaatttttctcgaaattctaaagttaaatttattattaataaaaaaacgtatgttaaaaccacaaattctagaggtattgtgtcattaaatattaatttaaaaccaggaaaatacacaattaaaacttataatttaaagactggtgaaattaaaacaaataaaataacaatcaaaacattaataatttcaaaaaataagaaagtaaaagctggtaaaaaaattaattataatgttaaagtattcaattctaaaggtaagattgctaaaaaagcaacaattaaatttaaaatcaaaggaataacttacaaaattaaaacaaataaaaaaggcattgcaaagttaaatatagttcttaaaaaaggaaaatatacacttaaaacatcttattttgggttaagtgttaaaaataaaataactgttaaa

SEQ ID NO: 76535 - DNA, 5574 bp, Methanobrevibacter gottschalkii
  source 1..5574: mol_type = genomic DNA
gaaaattcaacattaaatacatctattaagatcaacaatgatttaaatcaaataaatttaggcaacgaaataaatttaattgatgaagctccaaaagaagttttacaagatgaaagtgaaatttcaatcactcctcaaaactataataaatattttaatgtctatactggtaaatttaaatctgatattgtctcatctaaaataactactgtaaaaataggtaatgtttcaaaatgtttatttgcatttgaaaaacctgtaaatttaatgccgatagattctagctgtcaaattacaaatggggtaatacatttattgcctggaagtgatggatctacaatttccggtttaaaaattatcaataatgattctgttggggatattaagtatggaggtattttaatttctagagcacatggaatatggcttacaaactcaagtaataatcttatttataataatacaattatcataggcaatcaaaagggttgttatgccatgcctatgggttattcgaataataatagaattttaaataacactataatttctggtcttacgtcttgtattgtaatgggcagatcttgttataataatatttctaataattatattgaaatttgtggctatgaacttttcactacatctaatttaattttctttaacccttggggacatgcagattatgatgatggtgtagccgagtgtaatggaaattatattgcaaataactatttaaaaaattatggaactggaatttgggctataactttatctcttggatattactcaggagatacacaagtcattaataatacaattattaaaggttcatcaggtatttcaactagtgatatgttgttcacacaaccaaaaaatattttgataaaagataatacttttattgattgtccaatatctatacttacatgtagtaataatgtcacaatagaaaaaaataaaatttttggcagttctgaagataatgcaatctatattcaagctaatgatgcacaattgtataatcatagtgtaacaatttcggataattatatagaatttgaaaatttaggttgtgcgatattagtacatagtgacaatgtaacagttgttaataatgaaattcatttatcaaggtatggtactggaattggtatttctccaaccgattttcctaaagcatcatctaataattgtaaaatagaaaataataaattatatctcagtggtgatatgggaattcgtatacttggacataatacaacaatatgtaataattacatctctacaaaggataaaggcattgtaatttcatcttcgggttataaaatatataataatactataattgctaatataattttaagtgatgatgtgccaatctatattgaaggacatgtggtaaattcaacagtaatgtataatgaaatcgaaactaataatagtgaaggtattcatttcaatccttctggtgatttaagtgactattttggcaaggtttctgaaaatacaatcaatggaattattgaaaatactgaaactataattgttaatgatacaaacttttatgattattttgatttatcaggatatttaaattatgaatttaaaccaaattcaaaaaaaattatatttttcacatttttaactaataaaaatatttatttcacagataaaatatttttaagtagtaataaaatgtacaatttattgcataatgtttcgattaaattttttgaaaatgcaagcggatcattaattcaagatttaaatttttataatattgggaataatagtatcattttagatggggttaatgatgtatcaattaataacaatgattttacaattctttcaaataagggaaagaatatttcaacaatttccgttattggtggtgaaaattgcatcatatctaataataatattttcatgaactctaaatcaaatttcactacagcaatttctatttcaaatcctaatggtgccataattaaaaaactttcaaaaaactttaaaatttttaataataatattttgattaaaacaaatggaattgcaagaggaatttatgctgattcacttgttgagacaaatatattagaaaataagatcaatattatatctgattcttcggcttatggtatatcaatagaaaatacaaatgaaatagtatataacataactattgacaataatttagttgttattaattctaaagaaatgagttatttaatcaaacttcaaatgattggcacttctgatataataaacaattatttagttggatcaagtaatggtatttgcggtattggtgcttataattctttgaatttaaatataaatagaaatgaaatttctatttcaggcaaaaaaccaattaattttcctgtttttgatgaattaggtagaaataatgtggctatttatttaaaatccacagtaataaatggtttttcaagaaatatttttgatattgaaaattcaacaatattgattaaagattcttcatcgattattaaaaatttcaatgttaatagttatgttattgcagattataatcatgatttttattttgattctcaaaataaattaaaaagtaatattattaatgataatagtataattttatttaaaaacttcacttttaaaaaaataaccaatattaatattccggtaattataaaaccatataaaaatcttaataatttcactgctacattaattttatctgaaaatgctaataaatcatcaatttatggatttaattttattaatgcaaatattaatttaaatggtgtagataatgttaatatttttaataattcgttcaaatgtagtgaaattacggataataatggtttgaataatattatttttaataattcatttgaatttaaattaaataatgcagatggaattatttttaatggatgtgcaggaggtatttttacaaataattatattctaattgattctaaaaaatctaattttattcttattagaaaagctaatggaactaaggttaataacaattatattaatgctactggtgatagtttagtattaattaaatcagattcgtcagaaaatactcaaattttaaaaaatattattaatgttacatctactggcgattttaatgtgtataatgcttttaaaactcattttgataatatttcaaacaatgaaattaaatgtagaggtacatcaaatagtgctgtaatttattatgattcttcatcttcatgtaataaaattgaatttaatgaaattatttcaagttctagtaatggtagagaatatgcagttgtatttgatacaaaacacgctttatccaatactattgcaaataactatttaattacttctaatgggtataggagaggtaatgatgcagtatatgcaatatttgaattggtctgtaataatactcctgtaactatatatgtatctattaattcaactgaagatggtaatggtagttttacaaatccttatttaacaatccatcaagcattagagaacagtttaagtggagctataatctacatattacctggttattataaggaatctaatttaattgttaataaaaatattacattaaccgcaataaataatgatggagctgtttatattgatgcattaaataatcagttatttacaataactgaaaagggtagtttgactataaatgcattaaagatttttaatggattttcagttgaaggtggatctttgttcttcaattttggttctttaattatcaataattcagttatttataatagttcttcttattatgataattctaacccaacatttaaatttacaaatatacaaactccaactctttcatatagttatgattgtgaaaatcttggtttaggaggggctattcttaattatggtaatttattaataaattcatccaccctatttgataattttgcacataagggtggcctattggctgattttggaaaatcaacaattaaaaattcattaatatttaataatactgcagttcatggcggggcaatttttacagattcatctcatgaatttaacattgaaaatagtagtttcttagaaaatttagctattcaaacattggattactgttatattcaaagaaaatctttagattctggtggttatgagtatcgtagtttatgtgatatgcggccgggatatggtggagcaattttcagtaattcttcattaatcatatccaattgtctttttgagaggaatattgctaaatctggtggcgcaattggtcactactctaaaatagaattgaattcaaatagacaggggcctaattattatgctgttaatcaaaatgtttatagtcaatttagatatgtgcctaaattgaagattgaaaattcgatatttagatataatgaagcaaaagatacaagttgtggtaacttaagtatgatttctgataggatgtataattattattatagtattaactataatggtggagctatttttggttctttaagccaattaacaatctttaattcattatttgagcataatgtagcaaatactgttggtggtgcattatgtgttcaatgtgaaaattcagtaattgagagttgtaagttttataataatactgctggggaatatgggggtgctattgaggcttttggtacttataggatatttaatactgaaatacttaataacaatgcaaaaaatggtggtgctattaaatatacttcatataattcttatggtcatttacaagaaatgatgagtttatttaatgtcacagttactggaaataaagcgttatctagtggaggtgcatttattacacaagttgctaattttgcaatcactaattcaaatatttatgataatagtgccccatatggtaatactttttatggaaaatatgggtatgatagtagttccaatattgatgctcgtaataattggtggggctctgttgatggacctgatgattccgtttggaatagtgcaaatagtaaatttaaaaattggttgaatgagaaagtaaattggcatgttcctcatgttagtggtggaagttctaataatgatgagtctggtattggaaatcaaaataatggtgtaaattcatatattccatctagtgtatcaactggttcgggggtccatacaggttcaacattaacaaacaatgttaaatcttctggtgcttcttcaaaagggttctcattcactggaaattggccttcaggaacagcaaatggttttaataatggtgggtctggtgaaggtaatgctgtcaattcaaaagataattctggaaatagtagaacttctattgcaggcaatgttaaaaatttgaatagtgttagtaaaatcaatagttctaatgttaataatcttttttcagtaggtatggatgcaaatgctgcagattcatcagctagttctgcttcatcatctcaagggggggctgatgagagtttttcaaatgcatacgaaataattaatgaagttaaaaaagaaaataatcaaaaattttcaatatttaatatattgcttattatagct

SEQ ID NO: 76536 - DNA, 5184 bp, Methanobrevibacter gottschalkii
  source 1..5184: mol_type = genomic DNA
gcatctgaaattactttgaatgcagataattctattgatgaaatatctaatgaagatatgggaatacttaatgaagtttcaccctcaaatgatataaaacatatttatgtaaacgatactggggatgattcaaacataggttcaattaatagtccttattcttcaataagcaaagcaattggtgatgttaattcgtctacaaatacaacgatatatttaagtaaaggaacttttggaaaaaataatgatactaattttcaatttacaaatgaaataaatacttattttgataattgtaatgtgacttttattggtgagggaactgataaaacatttatagatggtaaatcaacatataaattcatgactatactggaaatcactcctaatttagtttttaaagatattacatttgttaattttagaggacgggggagttctgtttttgaacttttggaagcaggaaatttaacaattgataattgtgtttttaaagattcatattctactagtaatggtgatacaatttcatcttcaaatagtggtgatttaaaaattattaattctcaatttattaattcaaatggtggaataattagtttattatatgaggatgtatctcccggaactctttatttagaaaataatacttttgtaaatattactaattctgaaaataatggaattgcagttactagtaattatgctaaagcagtgattaaaaataataaatttaataatatcacttgtattaatcaaaatcaagttaccctttatttagaagctcccgatgaaggtacacttgttttaactgataataattttgttaattgtgagtgtttaaatgaatattttatggctccagtatatttgtgggcatatgaagaatatgtaatatttgaaagaaatatattcttaaattctactggtgcttctggattcaatatattgcttaatggtagaatggataatttaaatattagtataggtgctgatgagattaatgttcataataatgaaattaatcatggtgtaaatattccaattaatataactgatgatgtaggaaacttagttttaattaatagtggaattcaacttaatcttataggtgataataacaattatactccatatttaagtttaaaaaataaaaaactcacatttgctactgttcctgagagtggcatttataatgtaactatcacatataatgatgggttatcaactactgaagtgttaactattataaaaattaatatctctagtagtcctgttaatatttgggtatctcctaaaggttcagattcaaataatggtagtgaagaaaacccatttaagacaattcagcatgcaatagatacgggatttgaaaaatcattcaatgtcataatatatttagatgaaggaatttattatggtgaaagtaatgttaatttaataattacgaataaaggtagtcttcaaattatcggaaaaaaatataataaaactattattgatggggaacattcaaattggtttttgagtgttgatacttgtgatgttgaagttaaaaatttaaaattcattaatggtgctggaaataaaaatttaatttctggttcaaatttacttaatcttaaagattgtattgtagatagtaatattgcttcaagaaattgttatgttttacatcaaacattatttgataatttaacttatacaaacaatactggtacaatttattataattataatagaaatattacaaaatcaaattttattaacaataaaaatatttatgattctactggtattatttatagttcttgggctcctataattattcttgattgtaaattcattaataatactgcattatatgattatggtgtaatatactctaataacaacattatgagtcttaataattactattatggaaataaagctaaaaattatggaatattctatgcttcgtcttattctagtaataaaatgattttaataaatgatacatatattaataatcacgtagatggatcatatggaattggaatttcaccatattcctctgtagtaaattgtaaatttattaataactctgctggtacagatgcgggcataggtagtataacaattacctgttcatttaaaaattgttcattcataaataacagtgctactaagggcggtgtttttgtattaaatgctgttcaacatgcattgggcactacttatgaagaacttatttcatttgacaatgtaacttttgaaaataataaagctagcatgggtgctgatatttatctgcctccaagaagttcaaattcctattactcatatacatatcctattgaattaacaattacctttgataatattactgttacttccttaactgataatttaactgctagtgtttatggagttaatggaataattgttggaggtgcaattcttgaattttatttaaacgagttatatattggttcttctcaaattgttaatagtaatgcaattttagaatatgatggttttagtaatggaaaagctattgttaatggaaatattattcatccttctgtaaaaaataatataaataatgcaacattagatattaaattagataatgtattaaatcatattgatttctgggtttcaaacataggtagtgatgaaaatggcgatggtagtaaaactaagccatttaaaacaattcaatatgctgttaataaagcatttgaaaattgtcgtgatattactatctatcttggagaagaaacatattctggtgagaataacactaatttaactatttcaagtgcaagtaatataacaataattggtaaaggaattggtaaaacaattataaatggtggtaatagcagttattttgtaaaaattctcataggcattaataaaattattattagtgatttgactattattaatatgactccagataatagatttgatcttccaattggttctacatcaccatcaggtatacatagtattattaaaagtggttccacatcaccaatcactgttgataagggagcaacattatatttaaataatgtaaatatcacagaatgtcgtggaggtaatgctataattgatggtgaaggaaacattttcattgataattccatattatataaaaatggagtttcaaagggcattattaaatgtgaaaatttagtaattaataattcaataattgataaacatttagttggaggttatccaataataggaacgaacattataataaataatactaaaattacagatgtatttaatattattagaaatggattttattttatctccaatgctaaaaatactactattgaaaatacatgtgttttaattaataattgggaaaatccattaaatatattggatattattgaatattatgatactcaaatatgtcctgcagcttgtattgcttcaactaatgcaataattaaaaattcatcatttaaaaatgaatttgaattagtgtatttatggcaatcaactactgattattcatatcataatgtttactcaggatctaatattgaagcagttaattcttcattcgaaggttatcaattcattatatattctagaatgcttcaaaatccaatatataagttcgatggatgtacatttaataatattgctaatttgatgattatgatgcaatctagaaattctatagtatctttttcaaattctgtaatgttcatatcaggcaataaaattgcaagtaataatgcatttaataactctttcctgtttaacaataattattggggtaataattcaaaacccgtaattccaaactctgtatctaatttccaaataccttctccagataattggattattttaatttctgaaggagaagaaccagtatttaagcttacagatgggaaaaatgtcactgagtatatatgtaatttgccagctaaaatatcttatgttgccgatgaaaatggtgaaatcattcctgttttaaatttaaacggtaatggatataaatttaatgtggatgaaaacggtaatgttgttcttaatatcagtgctccgatgaaaaatattgttcctaaagttccagttgatgaaactgtattcgcaaatgatattgaagttattgtaaactcttcttctaactttaaggctaaattcactaataaatggggcgattcattaaaaggtattaatgtttcattcatcattggtgaaaatattatcaatataattactaatgaaaatggtactgcaatattgcctgttgactttgatttaggagtatattttgttaaaattgttaatccagttactggtcaatttattttcaaaactattgatgtgatacttgaaaacacggttactgcaaacgatattattgtaaagtacaatgataaatctaaattctctgttatttttactgataaatttggaaatccgttaattaacactaatgtcaaatttaaagtaggaaagtatattattaatagaactactgatgaaaatggtattgcttcatttgttattaacttcaatgttggtaattatgctgtaaatactattaatccagttactaatcaaagtattgataaaataattactgttaataaaatagctactaaattaacttctcctaaattaactgtaacttataatgctggtaaatatttaactttaattttaaaagattttaatggaaaagcattgattaatcaaaaagtttctattaaaattaatggtaaagtttacactaaaattactaattctaaaggacgatctagtttaaaaattaatctccctgttaaaacatacattacaacattaacctatgcaggagatagaaatcatattaaatcctctgcaactactaaagttatagttaaaaaagcaactcctaaaatgactgctaaaaaagcaacttttaaattaaaaacaaaaactaagaaatattcaattattttaaaagataacaggtataaagttatgaaaaaagttaaagtatatcttaaagtaaaaggtaaaacttatagagcaataactaattccaaaggaaaagcaacctttaagattacaaaattaactaaaaaaggaaaatattcggctagaataaaatattcaggtaataaatactttaattcaataacaaaatatgtaaaaataacaattaaaaga

SEQ ID NO: 76537 - DNA, 1008 bp, Methanobrevibacter gottschalkii
  source 1..1008: mol_type = genomic DNA
tcacttttatcaaatgctaacgattcattttcaaaagcagagccaaaagggaatgtttcaatagctatcacaggggatgttatgtttgctcgtaacatgccgggtgttttaagtgctgattcatctcctttttcaggtgtcagtaatgtaacttccaatgttgatttattactgattaattttgaaaatgcggccacttcttctgaaaatgcagttaagggtgatgttccacttaaatgtgacccgagatatgttccacttgcaaaggggaacaataacacaatagcttctcttgcaaataatcatgcatttgattatggtattgatggaatgaaggatacaattgaaaaccttaaaaatgcaggaataacgcccatcggtgctggtgaaaatgaaaaaacagcgcataatgcagtaactcaggaaattaatggtagaaatataaccatattaaattatatggattcggacaactttgcagaatattcttatgatgtaatgccttatgcaaatggttctaatcccggttactccgtatttgacctagcagatgcacaaaagcagattaaagaaaataatggctctgatttgattgtagtttatatgcactttggaaatgaatattcaaactctccaaatgacaatcaagttaaaattgcgcatgaattaatagattctggtgcagatgtggttttaggatctcaccctcatgtgactcagggaattgagatgtataatggaaaaccgatattttatagtttgggaaacttcatatttgaccaatcaaaccccgcaacgcactctgcttactttgttcaaattgatcttgtaaataatactggtgaatgcagtgtttatccaattgtaatttcgggatacctgccgcattatatggactcagatagcggtaattcattattaaatgaattgaatcctaatgctgatgaattagaagtttcaaatggtgttggtaaattaagatttaatttaacggaaggcgattcaaat

SEQ ID NO: 76538 - DNA, 1710 bp, Methanobrevibacter gottschalkii
  source 1..1710: mol_type = genomic DNA
agtgagatgcaacaagtgaataatgatagtgttgactcagctaatcagtatgtggaaccagtgaagaatgcttcttttagtaaggttagtaatactaattatctaaaggattcaaatttcactgtaagtttaaaagatgaaaataatgaagtaattgtaaataaaacagtttatttcactattgatgatggattagtaataaatacaacaaccgacgggaaaggcagtgcaaaactattattgaatatctcaaaaggaacacacactgtcaaatacatatttaatgaaacgggatttactccatttaaatcttcaactaaagttcttgttattacaacatcaaattctaagataaaagcgtcagcttataaatcttacatcggctttaaaaaacattattcctatgctaaacatatcagctttaaaaatacatataagattacattgactgctgatggaattccgttatcaaataggattgttaaatttacaatcaacggaaaatcttatagtaaaaaaacagattcaaaaggagtggccagccttcctattggtttaaaggcaggcagatatcctattaaattttcatatgctggtgaaaaaaatattaaaaaagtcagtggaagctctattgtatatgtaattaagggcatgcctaaaaagataattaaagcaaattcactgacttataaaaataaagtttcagccccatttaaaataaaattagttaatgggcgaggaaacatacttaaaaataaaaaagtaacattcactcttgatggcagaacatatacaaaatacacggacaataatggtattgcaaccatataccttaaattaagttggggaactcatagtttaaaagtttcatcagccaagacttcttattataaatctgttttaaaaaaatattctatccatataaaatctaaggcggttaataacggactttggatgttcagttcggatatgaaaaaagcaaacttagcatcacttaaaaaggttggaacaaaacatattttcctttatgcaaaagcaattgatgtatggggcagatcggatgttgagaaatttatcaaaactgcatctggttatggtattaaggttcatctctggatgaaagtgtttaatgatgacaatgataaatggattaatccggttaaaaagggcaaaatcaactatggtctgataaaatcaaaaattaatcttgctaaagaatatgcgaaagtaaaaggggttgctggaattcattttgattatttgagatatcccggcaatgcttataaatattcaaatggtgtaaatgcaatcaattactttacaaaagctgcaactagtgcaattcatgcaattaattcaagattcattgtctcagcagcagtaatgccggaaccatcagatatgaaatattactatggtcaggatatttcaacaatgggcaagtgtttggatgtaatcattccaatgatttataaaggcaattataatgcgggatcttcctggattcaaaaaacgactctaaaatttgttaaaaaatcaggtcatgctaaaatatggtctggaattcagacttaccattctgataggtctccgataaagctgacttcatctgctttacttaaagatgctgatgcggcggctgcaggtggagcagatggggtaattttatttaggtatggtctaactaatttgattaactttaataagtta

SEQ ID NO: 76539 - DNA, 1467 bp, Methanobrevibacter gottschalkii
  source 1..1467: mol_type = genomic DNA
gatagtgatcataataagacggacgattcaattcttggggaagctgatacgtcaacttcttcaaatattactcgcattggtgtgaattcaatatatgatgatggggtaaatgaaacaataaaaactaattcctcttttgtatcttctaacgtagtaacttatgaaaccttttcaaccaaaataactgtcagattattgtcgaataacaatccattaaatggaaaaaatattattatttctgtcggtaatgtttcatacaataaaaccactgatgctaatggtaaagttgttttaaatgttaaactcgcaaaaggaaagtataatgcaatgttttcttatggtggggatgaaaacattaatccttgtcaaaaaacaactactgtaattgttaaaactcccatcaaaacaaaaatttattgtgcagataaaaatattaattataggcaagatttaaagaataccttcattgtccgtttgattgatgggaatggaaaagctcttaaaagtcaaactgtaacttttaaagtcaatggtaagatgtatattgcaaaaaccgataaaaagggttatgctgaagtttgtttaaacttaaaaaaagggtctttcactgtcggattttcattttataaaaaatcaccgtattcacattctcacggatcttataaaataaaggtaaaagctccaattggaaaaggtaacgggtattggctttggccagctcatatgaaacatttgaatctcaaatccctttcaaaacttggaacaaaacatattttcttacatgtgcaggctatttcagtttatggaaaatcttctgttatttcttttgctaaaaaagcacacagatatgggattaaagttcatctgtggatgcaagtatgttgtattcgcggggataaatgggttcgtcctgttaacaaagatggttcatttaaatattcatttataaataaaaaagtcaaagaagcaatcagttatgctaaaatacccggcattgatggggttcacttggattatgtccgttttggcggaactgctcatttgtataaaacatctacacaatctataaattatattgttaaaaaaacaagtttgggaattcataaagttaaacctaattgcattgtttctgctgcagtcatgcccgaaatttcaaagatgatttcttggtatggtcaggatattcctacaatgggaaaatatttggatgtgattgttccaatggtttataaaggtaattttaatcaaaaaactgcttggattacaaaaattgtaagtaaatataaatcacaatcaaaaagtgctgtaatctggggcggtcttcagacataccactcagataataatgttaaaaaattgtcttattccgcactattgaaagatgcaaaatcctctaaagctggcggagctactggttctatactgtttagaattggactaactcattatttgaactttaaaaaagtt

SEQ ID NO: 76540 - DNA, 93 bp, Methanobrevibacter gottschalkii
  source 1..93: mol_type = genomic DNA
agtagtttcacatttaattggggaacagatactgcatcttactttgtgaacactgttggcggaagctctgatttaactaatgcgaacttttta

SEQ ID NO: 76541 - DNA, 72 bp, Methanobrevibacter gottschalkii
  source 1..72: mol_type = genomic DNA
acacttcccggatctgtggttgggataaatgcccttatacatcctaactggaatggtcttttaaatgtaaat

SEQ ID NO: 76542 - DNA, 108 bp, Methanobrevibacter gottschalkii
  source 1..108: mol_type = genomic DNA
ttgggttatatgtctttcataaatggaacgcccataactgacttaattactgaaggcactggtttagtatttattgtttttccaatgattttcaatattatggggtca

SEQ ID NO: 76543 - DNA, 48 bp, Methanobrevibacter gottschalkii
  source 1..48: mol_type = genomic DNA
ttaagcattactacaacaaccagcgaacttacagttaatgcagaatca

SEQ ID NO: 76544 - DNA, 360 bp, Methanobrevibacter gottschalkii
  source 1..360: mol_type = genomic DNA
gctgaaactgtaactattggaggatttgattttaatgttccggacggttttacagaagataaaagtcatgaaatcgtaaacatggaaaaagagcaaggtggaatcaaatacattaacaatggtaaattatttgaaaatgacaaaggggatgttgtaaatattcttgttgcaaaatatgatggtcataaagtaaccaataaaattgcaaagggtattgctgatgaacctaaaacaattggtggtgtagatggttacatagtacataatggtacttttacatcatttgattatgcaaaagaaggtaaattagtagtaattactaccaataatgaagatgcaattgaaggatttattatagaa

SEQ ID NO: 76545 - DNA, 558 bp, Methanobrevibacter gottschalkii
  source 1..558: mol_type = genomic DNA
cttacatcatcaaatagtcaggacaatagtaaaataaccattatgggtaatggatccattcatgaaaatggcactattggaattaaattgacaaatggtgaaaacacagctttaaaaaataaaactgtccatgtttgcgttaaagactcagaaggtaaaatcgtagttgataaaactgctaaaacatatgttaatggtgttgttggagttagattgacaaatgtgagtgctggagaatatgatgttaatgtaacatttgaaggtgatgaaaattacacttcaagtagtgtatctcaaaaattaaaaatcattgcaggagaaagtgatgatgatccaacatatcctgtcgacgaggatacggtaaccactactgctgatgcaagtagtactcagtcaagtcaatcctcatctcaaagccaatcttacacaccaagtagaagtaatgattatggtggtagtagtagcagtgatgatgatggtggtttggatgctgactatgatgaaaatggtaatgaaatgttgcctacagtagatgaagaaggaaatgaagtttcaaat

SEQ ID NO: 76546 - DNA, 393 bp, Methanobrevibacter gottschalkii
  source 1..393: mol_type = genomic DNA
aatttaaaggattttaaagcaacaaaaatgcttaaaaaattaaccaaacaaaaaacactaactgttaaaatttataactttaaacctggtgttttatgggctccaaaagcaataaaacttaaaaacggcgacgcaattgcaggctatgttgaatataaaggaaacatgcaatttgaaaaaggtactgggataacttcctggtatatcggatctggtcttgatggagacatagaaccacaccacacaaaacttattaaagcaaaattcttctttaaaaacaaaaaaggaaaagtaaaaacaaaaacagttaaaggaaatggtggtggacatatttctacttcactaataaaagggtatgtaccatataaagctaaggtttcttataaaacatat

SEQ ID NO: 76547 - DNA, 69 bp, Methanobrevibacter gottschalkii
  source 1..69: mol_type = genomic DNA
tccaatttaggttcaactcctgttgtggcagtgccttatgctattagtttaataacttcagttgatctc

SEQ ID NO: 76548 - DNA, 33 bp, Methanobrevibacter gottschalkii
  source 1..33: mol_type = genomic DNA
tctgttgtagcagcccaaaatccatacattatc

SEQ ID NO: 76549 - DNA, 33 bp, Methanobrevibacter gottschalkii
  source 1..33: mol_type = genomic DNA
tttttaggaaccttttataatgtccctactcct

SEQ ID NO: 76550 - DNA, 318 bp, Methanobrevibacter gottschalkii
  source 1..318: mol_type = genomic DNA
acaccatcaattgaagtcaaaaaaattgacattaaagatattacaagatcaatgattgatgaaaaggtatctgttcgtggcataattacagatattaaagaatcaagttcaaaaacaaattattttttgactataagtgatggggaaagtcgaattacattaattatatttgaaaaacaagtttcagagattacttctagaaatttagatattggagattttaaaaataaaaaggttgaagttgtaggaaccataacagaatataaatctgatttagaattaattttatcgagcggagacagtttgcgcataattaat

SEQ ID NO: 76551 - DNA, 147 bp, Methanobrevibacter gottschalkii
  source 1..147: mol_type = genomic DNA
ttgaaaaactcaaaaggcaaagtattaactgggaaaaagattacagtcaattattctggtaaaacttactcacgtacaacagattccaaaggttgcgttagttggaatgttcaaaaaaaaccgggaacatattcggtgaaatttact

SEQ ID NO: 76552 - DNA, 261 bp, Methanobrevibacter gottschalkii
  source 1..261: mol_type = genomic DNA
caaacaagcagtaaaacagcaaaagtaacggtaaaagcaatgccaacatcattaactgtgaataatcttgctttcacatatggtgacggcaacaataagttaaaagcgacactaaaagataaaaaaagaaaagttttagtaaataaaactgttgtttttaattttaatggtaaaaactataatcaaaaaacaaattcgaaaggagttgcaactctaacaattggagctggaccaaaaaaatacactaccacaatttcattt

SEQ ID NO: 76553 - DNA, 225 bp, Methanobrevibacter gottschalkii
  source 1..225: mol_type = genomic DNA
aaaaagacagtaactgtaactgtcaatagtattcctacaagtttaactgtaaatgatttaacttgtaattatgatgacagcaatgcatacttatatgcaactttaaaagatactaagaataataaatttttaagtggacaaacaatcacttttaaaatcaatgataaaagtaaaaatgtagttagtgacagcaatggaaaagcagggattaaaatagaagaaaaa

SEQ ID NO: 76554 - DNA, 525 bp, Methanobrevibacter gottschalkii
  source 1..525: mol_type = genomic DNA
gcaagcattagtaaaaagattaatttaaatgttcaaggagctttaacacctgaaatcaatatgcacaatggtttttataatgtatctaatttattagttgattttactggtgataatgctgagtacattgtctattgtagttttgataatggtgcttcttggtataaagataatcacagtttatcttttaatttaactacatgtaattggagcataatatattattcttcttttagaggattcaacagcacaattaaccatgttaattatgttctagatggggatgttccattggtttgggcaagtcatgggtcaggaatttataatactaattttcaggttaatttaacaagtgttgatttatttgatgaaaaaccaataatatattacaccttagatggtagtgaccctacagttcaaagcactatttactcagaacccattaatgttgtaaaaaacaccaatttacgtttttttgcaatggacacatttaaccatagaagtgaaataattagtgtttattat

SEQ ID NO: 76555 - DNA, 2691 bp, Methanobrevibacter gottschalkii
  source 1..2691: mol_type = genomic DNA
aatggaaaaacatataataccatacaaaatgcaatcaatgatgataaaacaaaaaaaggagacattattgaagttaataaagatatcataattgaaaatgttgttattaataaaaatatttatttaatttctaataatgtgatttggcaatctaacaataagtcccctataatttacatgaaaaatgtaaataatacctttattgaaggttttacttttaaatcagataatgggtcaggtattgaattaaataatgtttcaaattgtgttattcaaaataacaatttttataataaatatggatttagtattcataatgaaaataaagataatgataatctaaataatatttgtattcaaggaaataatttttatgataattattataattatattaattttgaagttttagaaaattcaaaaattattaataataattttgaatctaataaaaatgtttctgctataaccattttaaattcaaaatccaatattcttataaacaatcaatttactaatttaaactacggaattttaattaataagtcctatgatgatgttttctttggaaataatttctctataaataatattgggctttatttaaattgtgttgatagtaaagtaattagtaatacttttattaataatcattatggtatttactctataaatgcttctaatttaagaattaatttcaatcgtattgtagataattctaaattcggtgtttactgtaaaaagggtattgttgatgcaaataacaattggtggggtaaaaattatataactaataatgccttaaattcaggagatataaataataatgaaaatattggaataaattgttctgcttatttagttttgaatgtttatgaaactaattataaaattgataatggaattgtttataatgtttcttatgttgctaatttaagatcaaataattatggggaaatttttaatcaatattttattccaaattgtaaaattgtttataatatgtattgtgaatatttatatgataatggtgttgtgtataggggtgttaatagaataattgacttaatgttatctgaaggtagttctattaaagaatatagattaggatttttaaataatctaactgttacattggatcatcaaaatatctcatttttccgtgaaagttcatttaatgcatatgcaaccattgatatcgttagttctgctatttttaatggttcaaatcttgatattagtgttagagttccattggttgataatgtagattggtttagtattgtatgcagatatgtggggaactttaaaagtgagttattattaatttataatggagaagtgcgcaatacaatagttattgaaagttccttttataatgaagcaaagaatgtgttttcaaataatttttggaatgctttagatacatatcactcttgtttttcaggttatagaaataagcaaatatgcgcatatgcttatttatatttaaatgaccctagtttgaatacaattgaattattggataataaactaagtaaaagcaatatccaatttaagttacaagatgtttataatttactagctaataataatattactcttaatgatattttattaaatttaatcaagaattcttatagcttgtctgatttagagatgtcatttattgattatgcaaatggaaatttatttgatacaatgagtgtttcattaaaatatcctggaaatgacagattattttttgcatttgaagacactatcaacaaaacttttgtgtggagaggggattcttcagttagtttgtataatattcattatgtaaatggaggatattttgatttgactgcaccattccctattggcgataatggtgatttaatttatgacaatggaaatatttactccattaactataactgtatttatacatttttatcttcagattatgattgtttaaaaacctatacctttgcaaatagcaaaattaataataatgctctaaattattggttaaatcagaagaaccgtactgatgttaatggggaattatattataatataggttatatgaaagcagcttatggtagtttccttgaaggtttactagtaatttattgtaatgatgttgttgctgacgttagtgcagataagttcaatgtatcctggactcgtgtaaaccctatggttatgagtgtttgtgatagtttggaaggttattatctgactggagaatctgattttaactttggtcgtgaagtagttggtgatgtaaataatattaaatcatttaattttgcttgttcagcatcattttctattattgaaaagtatgttattgatgcattattccctaatgaaggaaataaatcttcagctatgttttctttgattgatagtttatttaataatggaactttagaatttattgttgaaggaaattatactttgattcgtagcttaaatgttagtaatgttgtttttgtttacgatgaaactactggaattttacgtgattgtattaatggatgctatggagcatattgttatgccagccaacaaactgaatgggggcataattttggtgaaaattcattgaaattagaagatttaattgttggtattataaatggaattgatacctcgttggacaatatgaataatgattggttaggttttgcaggatgtttg

SEQ ID NO: 76556 - DNA, 45 bp, Methanobrevibacter gottschalkii
  source 1..45: mol_type = genomic DNA
accggattgtttttagtttctaatcctgttggatggagtattgca

SEQ ID NO: 76557 - DNA, 78 bp, Methanobrevibacter gottschalkii
  source 1..78: mol_type = genomic DNA
acatattacgcagatgatttaaataaaggttggaattataataggggtgcacacttcatatttgatgttggtacttca

SEQ ID NO: 76558 - DNA, 57 bp, Methanobrevibacter gottschalkii
  source 1..57: mol_type = genomic DNA
tattatattaacaaatatattattggagacattgtaattaataaaatctttagcagg

SEQ ID NO: 76559 - DNA, 36 bp, Methanobrevibacter gottschalkii
  source 1..36: mol_type = genomic DNA
ttcggatcaagtatttttttgtttattttaaataaa

SEQ ID NO: 76560 - DNA, 42 bp, Methanobrevibacter gottschalkii
  source 1..42: mol_type = genomic DNA
ttcaattcaagtataatcttaaaatatctaaagatattaaca

SEQ ID NO: 76561 - DNA, 39 bp, Methanobrevibacter gottschalkii
  source 1..39: mol_type = genomic DNA
actgactcttttttaatggatccgataagtgcaataaca

SEQ ID NO: 76562 - DNA, 2979 bp, Methanobrevibacter gottschalkii
  source 1..2979: mol_type = genomic DNA
gctgaagatattaatgaaaccataactgcggattcttcaatagatgatgtgaatactgtttctgttgaagatgcagttgatgaaactgtatctgatgattcagatagtgataagggaatagttgaaaatcaagatgttgaaaaaacaaccatgttaactgataggggagttaatgttaatgcagcaacatggagtaaattatcacaatatgctggagttattggcactgattatattataactttaactggggatagttacgctactgatagtcaaataaagtttaataatggtgctacaattattggttctccaaataattacataactactggatcttatactaaaactccttttcttaatacaaattctgctctcaccataactttcataaatgtcacttttaagaatatgaatgttgattatcttttaagtttagcaggaacaaatgttttagaaaattgtaatttttataatattactgctggaactggtcataatgcagtaatctataacacagatggaacaatgaatttaactaattgtaacgttattaattcatctgcaggttatggtgttgtaagtaattataaatctggaacttatacaggggttgttatgaatgtaaatcattgtacatttattaataactctgctagtgtagaacctggtgctattaataattgtggtattttaaatgttgataattcagaatttattaataatactgctacttggtgggcaggtgcaattcacactcattacaatgcacaaactataataaataacagtctttttgaaggtaatgtcgcaggatggaatggtggagcattatatacctacagtacattaaaggtatataattccatttttaaaagaaataaatgtcacacaaatattggtggtggagctataggtgcttcaagatggtggagtggaaactatgatattacaatagtgaactgtacttttgaagaaaatgaaaactgtaatactaatggaaatggtggtgcaattactgctttgaatagtggggcattaaatgtgcatgactcaactttcatagccaatgttgcaaaaaatggtcaagcaatatctgctttcagtcaagcatttgaaaatattactgcaggtattccaaacttaaaagtatacaataatactttctacaatcacactttaactacatccgatacagttgaaataagtggaaattacacatttgaaaacaatacatttattaattgttatcagactaatttagggactaataacgtatttattaatcctgtaacacttaataacaataatttgattcttaaatcaaataaagagcatttgttaatgagtaatttatctgaaaatattttaaaaaatgctcctaatgtaatatatgtagatagtaattctgataaggactgtgatgaagatccaaatattgatggtcacaattgggaaactgcttatggaggaatttttgctttatcaagtgcaatatttaacatatgtgatggtggaaaaatttatcttgcagatggtgaatatagttatagaacaaacggtgctattactcatcctaaaaatttaactataattggtcaaggagcaaatactattgttgaccttatttcatgtggagaagaaactacttatacatgtatttttattaatttaacagtttctggtaaggattatggtaggaacaccaattttattaattgtacatttattaaaccaatttcaatatctgctgatataaatttaaatagtgttttaaaagaacatgctgtggaaaatggatatgcaaatacatatttaataaattttgataattgtgtttttaaagatgttgttgacgatagaataatcactttatttgaatatggtgctttgaattttactgattgtgtttttgagaatattactgctgattcaattgtttatcgcaatagtactggctattttgaggatgacagtatttcatttaggaattgtactttcagtaattgtaagtttaatggtgtagttgattctaagactaattttgatgatgctattgttattgaggattgtacttatgatggtgatgttgctttaggtactactgaggttgatggtcatttttatgtaaatgctactaaacttaaggttgttgctgttgctactaatatgagtatttcttcttctcaaagaggggttgtagttattactcttagagatgctgaaggtaatgctgttagtggtgttaatgttagttatactgttaatggtgtgaatatgagtggcgttagtgatgcaaatggcactatcactatttctgatttaactgatgaagttactgttagtgcaaatttcactggtagtgaatcttatttagcttccaataacactgctagctttaatttcacaattcctaaagtttcaactaaactctatgtttctagtgtgactacattttataatgcaggtaagtatttgactgctactttaaaagattccaatggtgaagttttagctaatcagaaagttacaattaaaatcaatggtaaaacatataataaaataactaatgctaaaggtcaggctactttaaaaataagcactcttttacctaaaaaatatactgctactgtaaattatgctggtgatgatacacatattaaatcttcagctaatgctaaagtaattgttaaaaaagcaactcttaaactaacagctaaagcaaaaacatttaaaaaatcattaaaaaccaaaaaatacacaataaccttaaaaaacaatgtaggtaaagtcatgaaaaagaccaaagtcacattaaaaatcaaaggaaaaacatacaaagcatacaccaacagcaaaggaatagccacatttaaaattacaaaactaactaaaaaaggcaaatacaatgcttacattaagtttgcaggaagcaaatactacaacagcttaaacaaaaaagtcaaaataaccttaaaa

SEQ ID NO: 76563 - DNA, 615 bp, Methanobrevibacter gottschalkii
  source 1..615: mol_type = genomic DNA
gatggtttaattaatacttttgaagatactatacatgcaggtggtgctgacttttcaatttcaggaaaagaaactggaaattcggcatatggaactaatacaattgattctagttggacagaaaaaatagccaaggtacctggagttgatgaagcttatccaatttatgttgttctaacttcggttggtgatgattatatgaatactttaattggtattgatcctgaaggtagtgaacttgcagacatatcaatgaaagaaggtaggatatttgaagacaatacttctgaagttattttaggtgaaatctatgcagaagataataattattctgttggagacagtatcataattaatggtgaggactttaaagtttcaggtatttatgaaactggtgatcaaaacatggctggaggggtttttacatcaatctctaaaattggagagttaatggatgataaagactcaatttcaaatatttatgttaaagtaaataagggggaagatgctcaggctgttgctgatagaattgatactaaatatggggataatatcacaacagtcacatcagttatggaaatgactcaaatggctgatatgttgaatatgcttcaa

SEQ ID NO: 76564 - DNA, 33 bp, Methanobrevibacter gottschalkii
  source 1..33: mol_type = genomic DNA
ggtccgcaaatgggaataaatccattgttcact

SEQ ID NO: 76565 - DNA, 639 bp, Methanobrevibacter gottschalkii
  source 1..639: mol_type = genomic DNA
gtatggttcattggtcatgatgttgatttagatgagggtagcaaaacaatattggtatgtgcaattgatgaaagcgaggatcggccaggtatgggggcttgtgatatggcattccttgttcatttggaaaatggagctattaaaaattatactcctgtttatccgggcggtatgacacacccaactgctcaggagcccgctgaagctcaaagtcagggtgccggatcagatttattacttcacgatgcattctgggatgtggataattctaaaggaatgaatcttgcaaaagaaatagttgaatatcgtacaggtagttcagttgattctgttgtagcaattaatactaaagcattagatgctattttatctgcagcagctcctcttgaagttaatggtaaaataattaatggaagtggaattgatttcattcgcgaagatggaagtaatggtgtgtctaggggtgatgcagtaatggaaatagttaaagctacagcaaactctgcaaaagatccggttaaaaaatctgcaatgataaatgctgcagtggatcaatactctaaaggtaacattattatggatcaacaagggtcttttgttgatttattagcatcaaaagggattgaaactttttttaat

SEQ ID NO: 76566 - DNA, 33 bp, Methanobrevibacter gottschalkii
  source 1..33: mol_type = genomic DNA
agttcaactgttatgggtgatatattatcatca

SEQ ID NO: 76567 - DNA, 66 bp, Methanobrevibacter gottschalkii
  source 1..66: mol_type = genomic DNA
atcggaaatcccagaagtggaattgcagtttatatgtcttatttaatttcagaaatgaatataaac

SEQ ID NO: 76568 - DNA, 420 bp, Methanobrevibacter gottschalkii
  source 1..420: mol_type = genomic DNA
aaagaaaaggttaaagtaaatgtttctattgatgatcatcctttaaataataaaggtttcattgtgataaaacttgttgatagtaggggtaaagatattgaaagtaacggaacaatacattataaaattacggatgagtttggtaattataaatgggcttataaatcatatgatggtgaaatcaggttaaaatatacggcgggtatttataaagttgatgttaaattcgatggtgattttcattataattctgctataaaaaataaatctgttatagttaaaactgagaaatttaatccatatacttattatgataatcataattggggtttaaatcaggaaatagatgattatatagaatataattattgggatgaagatatatatgatgatcctacaaattatgatggtgagggacct

SEQ ID NO: 76569 - DNA, 78 bp, Methanobrevibacter gottschalkii
  source 1..78: mol_type = genomic DNA
ggtatgttgagtgaatgggtagctacattccttggtgatggtttattatcttcatttgtctgtgatggtattataggt

SEQ ID NO: 76570 - DNA, 105 bp, Methanobrevibacter gottschalkii
  source 1..105: mol_type = genomic DNA
ttcccatatggcggatcagatcctcaaatgagtcttcttggtatgattggtactgctattgctccaatatttgctccattaggatttggtacatggcaagcagct

SEQ ID NO: 76571 - DNA, 78 bp, Methanobrevibacter gottschalkii
  source 1..78: mol_type = genomic DNA
ttcggtactcttgcgggtatggaggaagatgatgaagaaggaattactaacttaatacatgatactttcacaccatta

SEQ ID NO: 76572 - DNA, 54 bp, Methanobrevibacter gottschalkii
  source 1..54: mol_type = genomic DNA
caaccaggaaatataatctggagttattcatggttgcatattactgattttgga

SEQ ID NO: 76573 - DNA, 42 bp, Methanobrevibacter gottschalkii
  source 1..42: mol_type = genomic DNA
agtggtcaattaggttacttcggccaaaatttatctattaac

SEQ ID NO: 76574 - DNA, 141 bp, Methanobrevibacter gottschalkii
  source 1..141: mol_type = genomic DNA
attgcatctggcgatccagacggtcttgaaaaatctgcagaagatgcgagtgtccctgaagacttccaaattgaaccaataaatggaattccagatgcgatcttcccagattatgcatttgcaagcgccccagataatcaa

SEQ ID NO: 76575 - DNA, 36 bp, Methanobrevibacter gottschalkii
  source 1..36: mol_type = genomic DNA
aacatgccaatcccatttggtactagtggacacatg

SEQ ID NO: 76576 - DNA, 51 bp, Methanobrevibacter gottschalkii
  source 1..51: mol_type = genomic DNA
gttggaggaattcctcttttaaaaccatcaataagatatttactaaaacca

SEQ ID NO: 76577 - DNA, 261 bp, Methanobrevibacter gottschalkii
  source 1..261: mol_type = genomic DNA
agatcacttagtgagatgacaataacatcatcaacaaatccattttacacattacaatcaagagcggatttcacattacatgttttaaacttgcttgattttgttggaggcaatgcaggattaacacacgggcatttgttgaccagttccattccaggaagtgatttaggaccaagaatgctcattggaaaaattattgcatggagaacagaagttacagttacccccacactaattggacagatggttgtagactttggt

SEQ ID NO: 76578 - DNA, 699 bp, Methanobrevibacter gottschalkii
  source 1..699: mol_type = genomic DNA
atacacataacaacagataattcatcagaagtgcaaaaaaccgtgtttgatgcatctacaatcaataaaattccagatacttattttaactattatagagatggatatattgtaggaactactgtcgatggatttaatgctagtactggagaaaaaataacactaaatggcactataaaatggattggaaataatggtggaacagacgttaagatattagtcgaatccgacaataccacttatcttgttggtctatataaaagtattccggaagcggatatttatatagataaaatttcacttgaaactaatggcagtacctacccaaatttagtagaaattaaagcaagtccagaaaatatctcaacaatcaatgatttgaataaaaatttatcaaatagtgattttgaaatatctactataatctctcttgattccttggacttggtaaaaatccaagagatagctaacaaaataaattctcacgataaaagaatggctattaaaacacctagttcaggattggggaatagcctgatattggaaaatgctaataaacaaacacttgacgatgcaaattctgttttaggcaatattaacggacttacagatgaacttacaattagaatatacaactgtagtgacagccaattagagcaggtaaagaatagctataatattacaaatataagaacattt

SEQ ID NO: 76579 - DNA, 66 bp, Methanobrevibacter gottschalkii
  source 1..66: mol_type = genomic DNA
tcagaagttggtattttaccttatacttttgtaaatgtttatttatcaattcaggaaattgccaat

SEQ ID NO: 76580 - DNA, 45 bp, Methanobrevibacter gottschalkii
  source 1..45: mol_type = genomic DNA
gatttgggaaacaggattacagagatttatcatgccgtatttgta

SEQ ID NO: 76581 - DNA, 333 bp, Methanobrevibacter gottschalkii
  source 1..333: mol_type = genomic DNA
gttattactaacaatggaatttcatttaataatacaagtgattctgtagtgaacaatacaaccaatacaaccaatatcactgctaatgatactgatgaaactggtgcgactcatgataccggacttgtagcttccagttcagatgatggttccagttacagtagtagtggatatagcagcagtagtggctcaaacagcggttctagttcaggacatcaaagtgacaactctcaaagttcaagcggaagtgaatccagttcaggatcagaatccaattcagaaccagaatctgatagtgcaggacaaagtgaaggctcatccgcagacttcgaa

SEQ ID NO: 76582 - DNA, 123 bp, synthetic construct
  source 1..123: mol_type = other DNA
ttattgggcgggatcgatattgccaacacagctctgaccaatatggtgaacctgtatccggccaatgcgattgcaaccggcggtactggttggacggcgttcccagaatttggaacgccgttt

SEQ ID NO: 76583 - DNA, 102 bp, synthetic construct
  source 1..102: mol_type = other DNA
aatgtgtatttctacgataaattaggtaaaattgcggtcgatgtggttggcgggaacatcgacaaggtaatcccaacgtttattaccatggccctgccggaa

SEQ ID NO: 76584 - DNA, 84 bp, synthetic construct
  source 1..84: mol_type = other DNA
aaaaagacggcgttaggtctggggatttgcaaatttgtcttcggcgtggaaaccttgctgccggttgccccgtggccatttatc

SEQ ID NO: 76585 - DNA, 1026 bp, synthetic construct
  source 1..1026: mol_type = other DNA
actccttcgagtgtggaaacagaaggctcgaaaaatatcaccgacatgttgaaccgcacggtcgaagtgcccaacggggtgaacaacgtcatagctacctctccgcctatgaccaccgtactgtatatgctgtcaccggagaagctgaaagcagttaacttccaatggacggaggatgaattgaaatatgtgccgtctgaatacgccaatttaccggtggtgggtggttggtatggcacccaggatgggagctatgaggaatttattgcggcggaacccgatatcgtgattgaaagcattgacgaggggggagacggtgatgcctttaccgtgcaggaacgtcaagataaatttggcaagatcccggttctggccgtcaaagacacgacaaacgtcgaaaaaatcggagattccatttccttcatgggtgaagttataggcacggaagacaaagctaatcagctgaacgagtttaatactaaatatctagatattgtccatgataaaagctcgaagctggtggacagtaacaaaaaaacagtttactacgcagcgagcagtgacggtctccagacctacccgtcaggtgcctcgcacggccagctgattgatttgattgggggcaagaatgttgctgatagcctgaaccaaggtaacactacctcaggcgtacaagtatccatcgaacaggttattaagctggacccggatgttatcatcacgaatgatatgcatttctacaataaagtgtataacgattccagctgggcacacctcaaggcggtgaaaaataaaaaggtttacgtctctccacagtctccatttaaatggtttgacaaacctgtcggcgcgaacatgattattggcgttccatggacggcgaaagtaatctacccggaagactataaagatattaacatggtggatgtaaccaaagagttctatagtaatttctatcattttgatttaaatgataatcaggcaaaagagatcctgcttgatagcggacttaaagaatcaaattta

SEQ ID NO: 76586 - DNA, 108 bp, synthetic construct
  source 1..108: mol_type = other DNA
ggccgttatcctattagtccaatcgatgtgatcaacactatcttgtgcccgatattcccccagctggaggttagcccgaccattacgaccattgtctttgaaattcgc

SEQ ID NO: 76587 - DNA, 72 bp, synthetic construct
  source 1..72: mol_type = other DNA
atcgccgatccggatgacaaattgccagaaattgtgtattggctgatgggcagcctggcgagtattaccatg

SEQ ID NO: 76588 - DNA, 1938 bp, synthetic construct
  source 1..1938: mol_type = other DNA
caggatatctctaactcaacagatttcacttttcaaaatagtaacttcgattatttggagaagaccgacagtgttaacctgatcagtacttccgataaaattagcacacatattgatgtggtcagtaacaccacattcgatggtacggtggactattttaagattaaattgagcgacgaaaataacaagtcagtgccgaatgctaaagtgatctttaccgttaatggggttagttatgacaaaaacactgattcacaggggatctcttcacttcagattaacctggcggatgggtcatataaagtcatttcgaaattcgtgggagacagcaactacaaatcgtcctcaaaatcaaccaccattaccattgataacacgcgcattgtcgaagacggactgaacaatgctgagattcagaatataattgacgatgcgaaagaaggtaatgtgatactgtttaaaggcaatagctactccaatatcaatctggtgattaataaacgtcttaccctaatctcgaccgttaataccgtactcaaaagcagctcctcctctcccacaattaccattaaaggcaaagaagcgagctattccatcgttaaggggtttaaaattcagggaaacggggatggtgtggtcgtggacgggtcgaattacgtaagaattttaaacaacgacattactgcggacggcgtaggcatcacggcatttaatgttaaatatatcaatattactggtaacaacattgtcaaaaatggtaaatgtggaattattctgtattccaccgagaaatcttacataatcaacaatgtcattaacaacaacaatgcaaacggcatcgtactgactaaatccgacatcacctatatcgatagcaacacgatttcaaacaacgctcgttatggtatcctgctgaccaacaaattcaatggcaatagctacaaaaacggtcctgaaaacgtttacatcacgaaaaacacgatcaataacaacaaatgggatggtatctcggtcaataatgccgaagataatattaacatcaaaggcaatacaatcgttggcaatgatgaaagtggtatttcggtgaatgttgtcggttcctacaaaattcagtcgaatatcataaccaatagttacactggtgttcgcttcgatgaggatcacgtgcagaagaaaaaccaggaaattacgtataacgccatttacggaaacgcgcatgtgcagattgaagccaagtcctacaatggtgtgaatccgttatcggtcggcgataactggtataccgatgatggcctgctgtgcccgaaaatcaagacaaacaacctcaagttcaccgtaacccaaattggcaagaaccaattccaagccacttttgttgactcgaacggcaacatcgcaagtctgctccctgatcgtgagctgaaatacaaaaccaatgacggtaaaatcgcaacggtgatgattaagggcggcataggaacatttacggtcacggcgtctgacgccgacattattaagagcacggtggaccgcaccagccggaaaaatgtttatgattcgaacagtcccacgaaaaccccacagaatgggcagtctccaacatatgattacccgaacatcgattatggtggcggccagggcaatggcaatggtcaggggggcaatgccaacaatggtaacgggagctcacaaaaaagcagtgatgattctggcaacagcagcaatagcaaaaaaatggaaccgaacagcaatccggtaaaccaggcgaacgatgtatctcagagctatgacacgtcgcaaagcatggcgcgagctgatgcgtctgagatcagtggtggagcaaattcaggcagccaatctattgccaaacaaatcatcattgaagatgatgaattttttatagtgaagggtctttccttaattgtgttgttaatcctg

SEQ ID NO: 76589 - DNA, 1374 bp, synthetic construct
  source 1..1374: mol_type = other DNA
gtgagtatcaatgacaatctaggcgacgccagcagcgatctcgaaaatgagatcattaacagcaaaaatggggatatcattttgatcaaaccgggcacctataacatccacaacatcaccattaccaacaaaactatcacactccagggtattgggaatccaagcgatattatcattgatggcggtaaacagagcagtatttttttgattaacaacattacgacctgcgtgacgtttaagaatctgactttcattaatggtttatcgtacaactttggtggtgcgatctgcattaataccggtagtgtgtatatagataactgccagttcatcaacaacacagcgctgaacaacaccaatgcaggtgccatctccaactacggcaacgaggataacaaagcatacctccttgtaaacaacaccctgttcatgaataaccatgccgaccacgatggcggggcggtaacgacgtgttatgctaattcggacatgtataattgtgtctttattaataatacggccgttcgcgacggcggcgccgtgcgggtgagcgtttatgggtatggccatgtcgaagattgtatttttatgtacaatcatgctgatgagtggggcggcgcatactacagttggtcaggtacgtctaaaatcaatcgatgcatctttatgaacaacactgcgggcaccaatgggggggcagtcatggttagcggcaatctggaccttgaaaatagcattattgtgaacaattcgggtggaaaaactggaggttcattctacattcaagagccgatgtatcaagcgaaaacctatattaacgtcaacaacaatttaattaccaataactcttcacctaaaggtcaagaaatctatgtaaaatggcgccattcgcagaacctgtaccctgactttaacgataacgattggggcagcgaagatccgaatgattacaaaataaatgacccggacaacgttacggcacgtagcaaagtgaaaactacaacggataagtccaatcttttagatgaattgaattttaatgcgctgaacaagtattatgatctgattaaagattacttcccggaaaactatctggaaaacatcaagaaacaggcggaatccaaagctaaccagaataaagagaacaataagaacaatactccgaataacaaagacgaacacggactgaaagattcaaacaataccaaaaatagtctgaatgattcgaaaattatcctgtccaacaagaccaccgaaaacatagagacagagaactatctgatttcttctaattcaaccacgcccataggagatgacgaaaaagcctatgaactgaatgaaacaaagagtgtttccaaatcgcagtctccacgt

SEQ ID NO: 76590 - DNA, 2841 bp, synthetic construct
  source 1..2841: mol_type = other DNA
gaggataataatgtaaccgaaaatgcaacgaatgaggatttccaagcgattcagattttaatcgataacgccaatcctggtgactcgatctatttagaaaacaaaacttatcagggcagtggctctccgatcatcgtgaataaatctgtgaacgtttatggggttgatagttcgaagactattctggatgccagcaacaaatcaagtatttttctgatctctaaagatgtcaaagtgaacttcaatggtctgactctgacgaacggttataacgagaccaaaggtggcgcgatatacaatttaggtattctgaacattaccaactcgaaaatctccagtaactatgctgaaagtggcgcgatacgtaacgagggtacgggtaaattaacgatctcaaattcgctgtttgataaaaactgcggcagttttggtgccgcgattgataactacgtcgggtatctcaatatcgtggatacaacattcaccaataacgattgtcttgaaggtggcgccatctataaccgctttggtgaatttctggtgtacaattgcaccttcattaataactcggcggcgcgtggtggtggagtctacaataatcgcggcggcatgtatatttacaactcccgcttcattgcaaacaatgtttatgacctgggaggaggcattaaaagttggggtagctgcgaagtgtataacacggtactgatcaataatactgcaaaacagggtggcggcatttatgtaagcgaatttacactgattgcggaaaactgttttgtggaaaacaacagcgcgcactgggggggtggaatcgcggttgaagcaaaagctactgccaaaatcaaaaatgccactattatcaacaacttggctgaccgtggggcagggatcgatataaatatgggctcgattgacctgcaggactccattgtcaacaataatgtggccaaatatggggcggggggcatttactttgctctgctgtcgtccaccgtaaagaacacctatatctgtaacaacatcgcgaacacatccggcggaggttgctacatttacggatttcgcggtgttgtcgtaaatttcaccaacgtgatcattaataataattctgcgtctaaaggcggcgcaatttacagcacgggcacagcaaatatccagaacagtatcctcaattccaacaatgcgtacaagggtggagcaatttataatgaacttaacctgaccgtgaaggattctcagttttttgagaatacagcggacagttgggggggcgctatttataataacctcaactcattcatagataacgttgtgctcaattcaaacgaagtgaaacagtttggcggagcgatttacaacgaaaaactggtcaatgctaaaaattcgctttttgaatcaaacaaagcccttcaagcaggcgcgatttacagcaccaacgacctgatcattgataattcgcaattcatcaaaaactatgttaaacggaactactgcgttctaatgctgagcaaaggtgatgtgaatattaccaactccctgttcaaattcaacaccaacgcggacgaagggggttgtatttttaactataacgcaaacctgttaattgatgcgtctcagtttatttcaaatgatgccagaagttatggtgcagcgattgataattcgggtaatctgacgatcaaaaatagcttgttttacaaaaacaaagcctatggtgccgccgctattgataactcagggaacctggtcataatcaaatctaatttcacggacaatgttgctaccaataatggtggcgcgattgacagcaatggtaaattgatcattattgggtccatctttaagaacaacctcgcgggcaataacggcggagcattaatccttcgaggcgatacgacggtaacccattcgatcatctacaataatcatgacaaaaatgggtacgccatcttcaataaaggcgtggaaaacatatctctttcaaacaattggtggggcagtaataatccggactttgagaagttactgaacatgggcacctcggatgatttcaactggatcattatgagtttttcaagcaacaaccaactgattcagtataaaaacagcattttgaacataaatttcgataacgttaaagacaaaatgggtaatgtttataaaattaacagcaccgagttgttgccgatttttaaaatcgcattgagcaactacggcgaggttaccatatccaatggatttaagagcatgaataaaaatattcccctgatcacatctatttccgccaaaatcgataaccaaagcatcattctgaagattacgccgacgaacaaacgcatcattgacaacaagaacattgtggtggattataacggcaaggttacctataaagtgcgtgtcgttggtgtcgacggcaaaatcgtcggcgccaatgtagcggtggttatgaagatcgcaggcaaaaaatacaccgttaaaaccaataaaaatggctttgtaagcaaattattcagcctgacgccaggtaaatattccatcattacgacctataaaggatttacagtgaaaaatagcatcaccgttaaaaaggtattgtatgctaagagcatcactaagaaaaagagcaaaaagattacctattctgtctcactgaaaataagcaatggcaaaccaattgccggtaaaaaaattaccttcaaaattaagagtaaaacttacacggctaaaactaataaaaaaggggtggccgtggtcagcttcaagaacctgaaagtggggaaatactcagtaattgtgaactacctcaactccaaggtcaagacaactctaaaaatcaaa

SEQ ID NO: 76591 - DNA, 4338 bp, synthetic construct
  source 1..4338: mol_type = other DNA
tcagatgatagcaatctgaccgatgatctgtcaagctttgccagtgattttgataaatcaaatctcggccagaacatcgaagtgaatttagataagctgagttttagcgaggatagcccgttatcggacaccataattgttgaagaggtcgaaaaagatcacaatgaaatggacgattcaacaatccaaaaagccatcaataatgccaaggcaggagatacaatcattatcaatgggaccagctacgtgcactgccactttatcattgataaaaaactcacaatcatcagtaacgttggaactactatggaaccatgtggtagcgacgctgtctctggccataggggcattttttacattagccctgaggcgagcgggacggtaatcagcggtttcacgatccgaaacgatgttgcgaaagcggacgattacggcattttggtacgcggggcggacgatgtgaaaattcagaactgcgtcatttacaataatggcttgtcgtccgacgcaattagagtggaaaacacaaaaaacaccgtcattgagaatgtctcaatctccaaagcatttaatgggattcgcattctggactcggaaaacgtcaacataagcgatagcttcattgataacgcaaaatattgcattaatgtgattgactctaacaaaattaacctggtgtcgaacaatattacgaacaataaaatctcaggaattgcgatctcaggctccagtaagaatatcaatatcctttctaacaacatttcgaaagggcatgtgggcatcaacctgaccgtcgcaaaccacgtttatatcatcagcaactatatcggcctttcggataaatatggtgtttatacaaattgtaacatcacgaaaatggaaatcaaaggtaatttcatagaccgcaatggtaactacaatattttcaatgaccatcgtgtgaaaaatctgtttgtcaacggcggggagaacaagcaggtaattaacaataattatatgattggtggggacaatcaagatcggccggtatggcatcaggtttacgaatatcgtccgggcaagggtgataacacctacaatccggaaaccgacacgtacacgtacgttggggaggataatggcgactactatggtcatcagagtggcacctttatgggctatgtattagctattaatcaatttttgcagtgcccgaacatctatttcactttccccacgaatggcgtcaccccatggaccaaaacgggcaactacaacctctacctgagtgagattactcaggtgaaaaaaggcgtatattccatttcaatcgttgacgttgatggcaacttagctgaagagattagttcggtacctgttacgttttatctgatgaaaaataacacggataataacggtaagcaaaaagcgcctcaggaagatgatgtctctaaggtagtcatgatgaagaacggcacggccacggtgcgtttttacccggacgagtttaaggaatcggataacattctgcttgcaagtttcccaggtatcggcaacaacatatattcgaacatgtatagcccatataaactgttcagcatcgatgataaattcatccccggaaatgtaacggaaacgaaagtcactgtgagcaatctgaacacctatccgaactccaatgccatttttaaagtcatcctgatcgacctgacgggtaacgcgatcgccaacgagctcgtcaacttcaaaatcaatggtaaatcttatggcgcgaccacagatgtgaatggtgtcgcgaaaatcaagatttcacagtccaaagaaggcacttataccatcgcggtcaactacatcggtgatgatatcgattatacttccagtagcgctcaggcgaaagttgccgtcaaaaaaatttcgactaaaatcctatcttcaaacgtgtacatgattccaaacattgctgaatactattctatcaccctgaaagacgcctcaggtcacggcatttcatatcagaaagtgacgtttaagcttaataagaaaatatacacggtaaaaacaaataaaaatggtgttgcaaaacttaagctgaagtttacgaaaaaaaccacttattatattcatgtgaattttgaaggcaacagtaaatacaaagcggtttccaaaaccaacaaaatcatcgtgaaatactcctcgaaaattgcgaagctgaccgttccgaaagtgaccattctgccgaaaacctataaatactacaccatttcgctaaaaaatactaacggtaagggcattgccaaacaaaagatcactgttaaattaaacggcaagacgtatattaaaaccaccaatggtaaaggtaacgtggccattaaagttaaattctcaaaacttggcgcctataaagtaagcgcaatttacaaaggcagtaaaatttataaaaaaacgtcgtccaatggcaaaattgtcgttgccaagtcctctactaaattcacagcgccgaaagtgaccattcttccgtatgagaagaaagtctacacgaccactctgaaaaccagcgctggaaaagctcttagcaagcagaagattaccattgttctgaatggcaaaacctattctaagacaacgaacagcaagggtcaggctagtatcaacgtcaaatttagcagcgaaaacgtgtattctgttatattgaaatattcgggaaatggctattacaaatctagtaaagcaaccggcaccatcaccgtttccaaaatcagcacccagctaataagctacaataaaacctttgcgattgactccacgaaaaacttcaccatatcccttaaagataaatctggtaaaaccctgtccaatcagaacatcacgttcctgtttaataatcagaacctcacaaaaataacagatgaaaatggtattgcttctgttaacttagatgcaaacgtagggtcgttcgaaataatcagcaagtattgcggaaacaatcagtacaaaagcatatccaataccaacatgattaccatctcgaacaaaaccaatgttgtatttgttgacgccagtttgcccaattctgaaattcaaaaaattttcgatgattgcaaaaacggaagcaacgtggaatttctggggaacagctataatgatatttcactcaatatcaacaaaccactgaatatctacagcgaaaaccgcatcacgctcaatgcgaaatccatgagtccggtcttcaaagtgttagcctcggatgtgaaaatttgtaacctgtccattgtgggcaactcttatgatggaattgagatcaacaacgcggttaacgttgtaatcttcgaaaacaatattctgaatcgtttggatcaaagcaaaatcggtgaatatatgttgagtaccatttcgctgcccgggtatgggatcaacgtgattgactcaaagaatgtggaaatttctaataactcaatcaacacctttgaaagtggcatctttgtgtccaacagcaataatttaagcatcaactcaaatgtgctgaaagagaataattacgggattaagtatggattcaatgtgtccaacagcaacatcacaaacaatatgattagcgaaagtattggtctgtacaccaatttggtgcctgaaggcccgcgcggatatggtgtatttctgaacaattctgccgtcaatgtaaccattgcgaaaaataacatttcgtggaatcatctggggatttccatcgacgcaaattactcaaccggcattctgataactagcaatctgatttcggataacgtactggagggcattcgttttaatgaaggttacgacttggcgaagaatgctattgaaccggtggtgactgacaacgcaatctaccgtaacggccggggtccgagtatgatgatcctgggtgaactgagtgcaaaccctgcaggcatttacggtcctggtgcgtttaatgattctttaaagttaaaactcggtgcgaattggtatggtaaaaacctgattgttacctgggacaatgatacgggggttgtgggctatggaacaatgtgtccacgcattaacacaacaggcatcgcctttaaagagataacttgtgtgaacccggggacgtatagcatcacattttataagaacgatgaggttgcctcaaaattgccggtatttaatatgtatgcgacgctgaacgacaacgtggaaattgtgttcgacgtgataaacggtgtgggggtgttcacttttgatactcaaaaattcactacgggcgagaacgtcattaaagtgtctagtggtagcctgaacgactcggatcgcatttttaaagtggaaatgagcaagaccttagacgatagtgaagttccgatt

SEQ ID NO: 76592 - DNA, 33 bp, synthetic construct
  source 1..33: mol_type = other DNA
aactttccgtataccaaatggctgtacttcgcg

SEQ ID NO: 76593 - DNA, 177 bp, synthetic construct
  source 1..177: mol_type = other DNA
ggggtatcgttaagcttcgataacgatgacggcccacattggaaaaatgttactgaagagatgacgactaacctgaacgagaccgacaattttacctatgatgaagaagtcgacggtgtggattttaatagtaatgaaacactgacggaattgaacgtgaccgttaaaccgtcctac

SEQ ID NO: 76594 - DNA, 732 bp, synthetic construct
  source 1..732: mol_type = other DNA
cttactgggtcagtcggcacctccaatggggacctaaatggccaggatgttcagttagcggcggcagctagcttgaaaaacgtttacgatgaaaaactgatccctatgttcgaagagaagtatccgggtgtaaaagttacaccgacgtatgcgtcaagtggggatctgcagaaacagattgaaaatggtctgaaagctgatgtgttcatgtcggcgggcaataaacagatggatgcgctgatcaatgaaagctatgtggataatgattccaacgttaagtttttagaaaacaagctcgttctgatcgtatctgctgattcaaacgtgaacgtctcgagctttgaggatctgaaaaacgtgaatggcaccatcgcgattggtgacccggagtctgtcccagccggccagtatgccaacgaatccctgcacaatcttggtatttgggacgatgttgaaagtaaactgtcgttgggaaccgatgtgacagcagtattaaaccaagtggcgcagggcagcgccgactgtggtctcgtatacacgactgatgccaaatctagtgacgaggtgaaagtcatttgcgaagcaccggaagatagcctgaaagacattgtgtatcccgtggcgccaataaaagacagcgagcatgccgatgccgcaaacaagtttatggagttcctgcaaacgccggaagcacaaagtgtctttgaagactacggatttaccattcatgaa

SEQ ID NO: 76595 - DNA, 69 bp, synthetic construct
  source 1..69: mol_type = other DNA
ttcggcgttcgcgggccgattggtagttttctgatcgatttctttgccgtgaaaattgcgtttagctgg

SEQ ID NO: 76596 - DNA, 81 bp, synthetic construct
  source 1..81: mol_type = other DNA
atcgcgggtaacattgcaggccagacccgcacgctgccgatggcggtttatagcgaagtggctgccggcaatatgggggat

SEQ ID NO: 76597 - DNA, 33 bp, synthetic construct
  source 1..33: mol_type = other DNA
gtggcgggtctggggccgaccgccattgcaggc

SEQ ID NO: 76598 - DNA, 57 bp, synthetic construct
  source 1..57: mol_type = other DNA
ccgttactggtgagctatggtgcgagtggccagaccctgaacgaagcaattgcctac

SEQ ID NO: 76599 - DNA, 33 bp, synthetic construct
  source 1..33: mol_type = other DNA
agccaggtggggggtgattatggcattgcgacc

SEQ ID NO: 76600 - DNA, 63 bp, synthetic construct
  source 1..63: mol_type = other DNA
ccgttgagcacgttatttgcctatactccagaaaccaccaacctggtgccgggcattgcgctg

SEQ ID NO: 76601 - DNA, 1113 bp, synthetic construct
  source 1..1113: mol_type = other DNA
caagcctgctggaatccatatgaaaatacgaacgaggtagaatttgcaatagctaacttagacaacggctcgacctttgaagggacctatctcaatgttggaaacgagattgttaaagatttgaagaataatactaaatttgattggaagtttgttacggaagatgaactgcgtaaaggggtgcatgatggggattattatgctggcattatcatcccgaaaaatctgagtgagaacatcgcctccattacttctgataacccgaaacaggcggagctggaatacctggtgaatatcaaaagcaaccccgtagcgaccaaattaacggacacaggtgcgaataccgtttatactacagtgaacgcaaagattgtgcagattataaacctggcagcttacggcaaactcggagacctgaaagatgggctgtcatctggggccggtcagttatacagtggtggaagccagctgtctgcaggtgctgccaaaatctcgtccggtgccggccaagtctcctctggagtgagtgacgtgcaaaacggggcaagccaagtgcagagtggtgcgaatcaagtgcagcagggctcatctgccattaacaatggggcgagtgatgtgaagcagggcagcgcttccattaaacagagtgctagtgacctggagaaaggctcacaacagatccaatcacaggtcgacccgtccaccctcccggaacctatgaagcagtatgttgaaggcaatattaaacttgccaacggcagcggcgaactggcgaaaggtagctcccagttagccgatggttctgtcaagcttgcagatagcagctcgaaattggcgaacggtgcgagcaatgttgcgggtggtgccaaccaggtcgcgggcggctcggttgagctggcaaaaggctcgctgagccttgccgcaggtgcgcaaatgctgagcggttcggcgagccaggcattgttctcggcggctggcgcgctaagtagctctgccaattcattgtcaagcattacgggaatcaacgaaaccgaactgggcgattatttctactccccgatcaaactggaccgccaggaagtattctccgtaccagattacggctcaaatgtc

SEQ ID NO: 76602 - DNA, 129 bp, synthetic construct
  source 1..129: mol_type = other DNA
ggcacgggcgggatttacccaattgaaattatgcaggatttctttcagaccctgtatccgtatttgccgatgacttatgcgatcaccctgatccgcgaggcccaattaggtgttgtgtggagcaactac

SEQ ID NO: 76603 - DNA, 78 bp, synthetic construct
  source 1..78: mol_type = other DNA
ttctttaatgcgagtttatttaatacgtattcgttccataccattagcgaactgggcatcccgaacgttaactcccca

SEQ ID NO: 76604 - DNA, 36 bp, synthetic construct
  source 1..36: mol_type = other DNA
ggcatcattaccgcggtgggcgggtttaaactgggt

SEQ ID NO: 76605 - DNA, 345 bp, synthetic construct
  source 1..345: mol_type = other DNA
gcatcttcggacgagataaacgacggcattgcgatttctggcgtcatcattaaagggaatgatatcgttccggtggatacgatccggtccaacgtgatgcaggcgggcttccgcgacggtagcgtaatttatggtgatatcctgaaaacttccaaacgtgaggtttcactgcaggatgcgattcagacggctcaagaatttgcaacccgctcgacggtgccgggcaccagcgtacagccaattactgccgccgatgttcaagtggataagaatacaggtgtggtgaccgtcaccgttatcgaagattttagtagcgtcgaattggacaacaaaacaagtggggga

SEQ ID NO: 76606 - DNA, 1098 bp, synthetic construct
  source 1..1098: mol_type = other DNA
gcgacttgcaatattatagtcatcaccgatccgtcgggcaatgatccgaatggcgcagctgcgggcagcatgtcgtttgccgataacatgttccagtcaacgttcctgctgtctcgcagcaaccattttgctgtcctcagcggagggacgggcagcagcgacacccgtctggatagcatcgttgatgcagtggccagtttggaaaacaacgcttcggcagcatccgctgcgagtctggcgtcgcaattcaagggcgcccgtttggttgtgggcggtcccaacatcggtgcggctgtgggcgggtcttttaacgcctatgtaattacagtggacgattcaagtaatgatattaaagtaaccccgtacaatagtggtgtggccacactgcagccgggccagaaaggcgcgattattcacttgcgcaacacggctggcaatccactgtacggtactgccgactcggtacgtaaagaaaccgcgatgaacattggtaagatgattcgcgatggctatcctgccaccaccattctggcggaagctatgggcgaggtggcgaaagactctggggaaaaatatggtggggggggagtaaaccttgtctctggcattagcacttccgacatgtttacacccaaggagctgaacagtaccggttacccgatggacgaagaatattccaaggtttgtgatagctgcggatgggccatgggctttccagcggcagaagcctatgagaaatgccctgtttgtgggggagatcttcgaactgtctatgcgtaccaggcattaggtgacgcgctaaccgttagcagcaaagccgtgagtgtgtcagtctatggaagtgaccgcccagggctggcggaaacgacgaaagaaatcgttgaggcatccgtgtcgaaatatggttatgatgcatctgccatctccggttccattaatcggggtataaataatggtctgttagtcggtgtggatcatgtggaacctaaagacatcaatgtaaaacaaggttcaaaagcagttggcgtttactacaaatcactcccgagcgagcgttcatctccggcgtgggatttaccgatcgatggcaacatcctg

SEQ ID NO: 76607 - DNA, 39 bp, synthetic construct
  source 1..39: mol_type = other DNA
caggtgtatctgatcagccagattcaattaccgctgacc

SEQ ID NO: 76608 - DNA, 264 bp, synthetic construct
  source 1..264: mol_type = other DNA
atgttacaagcaaagaaaacaataaccgtaactgttaaaagtatcccaacctccctgaccgtcaacgatctgacgtgcaactacggggaggataattcgtatttgtatgcgactctgaaagacacgaaaaataataagtttcttaatggccagaccatcacgttcaaaattaacgataaaattatcaacgttgtgagcgacaacaagggtcgcgccaaaatcaaaattgatgaaaaaccgggcctctacaatgtgattgtgtca

SEQ ID NO: 76609 - DNA, 432 bp, synthetic construct
  source 1..432: mol_type = other DNA
gcgtcgatcagcaaaaaaatcaacgtgaacgtaataagcttcaacccgactgtgaactacgatggtggcttttacaataagagttacctgaatctgtcactaaatatcaataacgcaaaacttattaagtattgtctcaataacgattcgtggagtcagtctgacaaaagcgtgtcatttattctgaccaatggaatctatgatctgtattatagcaatggtagtgggagtattttccatgagcactacctgattgacaataactgcccggttgtctggagcaacttcggctccgacctgtatgattcttctattattgttaacttgtccagctgggataaccttgacgccaacccaaaaatttactattcgttagatgaatccaattttaaattgtatgaaaacttactgaatatctcacgcacgaccctg

SEQ ID NO: 76610 - DNA, 60 bp, synthetic construct
  source 1..60: mol_type = other DNA
aaattctacagtatcgattttaatggccataagagcgaaaccaaaacgtgcaactatatt

SEQ ID NO: 76611 - DNA, 633 bp, synthetic construct
  source 1..633: mol_type = other DNA
ggccgcggctttaccaccatccagtcagcaattgatgactcaaacacccacaacggtgatatcatcaaaattagtgaaggtctttacaatgaaccactgactgtcaacaaattcgtgacgatgatcgggattaacgcaacgctgacaagccgggacccgtcccgtccggtgattgggattacagggggcggaagtaatagtgtgatttacggatttaaaatcaaagattcggagcatggtgtagttatttatcatgccgacaatgttagcgtaattaataatcaatttatcaacgtggtgaaatccattgaaatagatgatgataagaatactctggtggcctacaattcgatcgatagcgacaaatttctgaacttcatgtctggcgttgcgattcgtaagagcgataatctcatggtcttcaataacaatatctccctaaattctgacacgggtgctggcggtatcgtcgtgaccaatattacgtcaaataacatttcgattgtgaataaccgcataaccaacaaaaacaacttaaacggtatcggcttgtatgttatctgctcgaatgtaagtattgatagcaacaacgtctctaattttaacgcgggcctgtatgttgtttccagcaac

SEQ ID NO: 76612 - DNA, 462 bp, synthetic construct
  source 1..462: mol_type = other DNA
aacgaatttaaaaacaacaatcatggcgtgtttttacgcgtcagcgttaataacacgtacgcgttcaataatattcatgataatatcttgtgtggtttcgttctggataccagccttctctcgtataatgacagttgctacttgaaccggctgtgcgacaacagccagtatgatttttactcagaagccaacagtgattacgtgattaacgataattggtggggtgaaaacaccccgaaaatctcgattaatcgttctattctggccaacatctataatgcgactggcaatgtaattatgaacagctggatggtcgcacacttattttcatccagttataaaattaatgagaataacaatatcgagcgcgctaaattctatgtggatctgacatataacaatataggaaacgacctgtcctataaggggtacatcccaaacaacctgaaatcttttattggc

SEQ ID NO: 76613 - DNA, 186 bp, synthetic construct
  source 1..186: mol_type = other DNA
gttgactttgaactgaatgatttatttaaaaaccatgaaaacatcaccgtcatgtctattttcgacaatgtaaaaatactgaacagttttaacaaaaaagtgacgattgatatcatgttgttttcctcggcgtgggattttgagaacaattatttcgtgaataagacttaccagattccgttcagc

SEQ ID NO: 76614 - DNA, 1194 bp, synthetic construct
  source 1..1194: mol_type = other DNA
accttttgctggtctgaaaccggactgtttactggcaaaatctacgtaatagtaaatggggaaatcctggacgaaattaacatccacaatcttttttaccaaaaatttaaaaataactattccacaaatgtttttgaagcgatcaagttgctggacacggttttcgccagtacgaaagaaggtgtgtgggcgccgaacgggtactatttctcatttgcgaaagcagctaacattgattttcgcgattataattcggtgtataatcgctttctgaactacattaaactctattatgatctgaccgactctgaccttaactttgtaaaaaactacaaaggctttttcattgattttattgatatgacgattgattttcatggtgacatgacgccagatatcaactttgattacaatggcgttcacaaacttttaaagccgccgtcgagctatgcgcaccgtataagcaatatctattacactgatatcgaagatgaaaataatatcagcattggctacgagggtatgcgctcatttgcaatcgtgaaagataatctgacaaatgatgatctgcagttctggctgaaccagaaagaactgtatgctcccggtttgatgaaagccgcttatggtacctttttaacgtctttgctcgtgatttatgagaacgaccgtgtggcggacgaatccgcaatcaaattcaatgtgacctggtcccgtatcagccctgtctgcgtttcgttgtgtaacgactataactgtttatacgttaccggggagtcggatcatggaatgggcagagaagcgatcggaaacattagcgatgtctggaagttcaatttcgccaccagtttctccttctcactggtggagcagctggtcggtaataacatttggaacgatacgaccattggcagcgtgacgctgggtctcattgaaagttacttcaacaacgaaaccatggaaatttttacaagtaacggctatatatttattaagtgcgagaatgacggtaacactctgctgttcctggatttgaagactggcattgtccgggactacttcagctactatggcctgcttgggacaatgccgtgttatcatgacaacatcaccgaaaatgcctggaaatatggcaataacctattaaacaatatgggccgagagtttaatgatctgaaaaacattttcggtatt

SEQ ID NO: 76615 - DNA, 312 bp, synthetic construct
  source 1..312: mol_type = other DNA
ctgccgattatcatgtttctgttcccggagcaggttaacgaagtgtggatgaactttgccagcttgtttaatccctattacaaggattacccggatattccaatttatgaaaacacctatccggcgaatatcataaatccgcctaaactggtattagacggtaaatcctcggatgactatattatttcacaacttaaaaataatcgtaacttcaacaacaaatataaacgctacaattctaacgtcaataaggataatatcaacttcaaaatcaaaatcgggcctattccgagtggcaaaggcccaaaggac

SEQ ID NO: 76616 - DNA, 180 bp, synthetic construct
  source 1..180: mol_type = other DNA
ggtaaatacctgaaagaactgtataaaaactataaggatgcgaaaagtaaaggcgaggtgttaaagttcgtcaaatcgaatattaaagaactgtttgccttgagcctgtatttcgaatccattgaaaccgttaaccttctaatcaatctctttctgtacgagatcgaaaaagacaagggg

SEQ ID NO: 76617 - DNA, 726 bp, synthetic construct
  source 1..726: mol_type = other DNA
gtttcagataacgtagttgagaatgatactctgagcgttgactgccaagtaggcgaactgtgctcggatacgattgaagtgtcatccgacaactattacatagataacaatgtcgtcaattcaagcgacattaactttaccgacgtgtattccggcaatgtagtgaagaaagtgaaatctaccgttaagacgtcgattacggccaaagatatcacgaaatattttcaggatggtaccagcgtgaaagcgtatttgaaaaattccaacggtaaagtcctgtctggcaaaaagatcactgtcacttactctggcaaaacttactctcgcaccactgattccaaagggtgtgtcagctgggacgttaaaaaagggccaggaacctattcggtgaagttttcgttcaaagctagtggttacaaaagcagcagtaaaacagcgaaagtcacagtaaaggcaatgccgaccacgttaacggccaataatcttgtttttacctatggtgataccaacaacaaactcaaagcgacactgaagaataaaaaaggcaaatcaattgtgaataaaacagtggtgttcaacttcagtggtaaaaaatatattaagaaaacgaatagcaagggagttgcgtgtctgaccatcacggcaaaaccgaaaacataccctaccgccatcagctttaccaatgctaactacgtgaccagcaaaaagaacaacaacagtaacagt

SEQ ID NO: 76618 - DNA, 4134 bp, synthetic construct
  source 1..4134: mol_type = other DNA
gcagatctgaacgagagtgataaattggggtcgggtgtcaatgtcgaagataaactcgaaaatagccagaaaaataaaagcatgtcggatactaaccagaatcccgccctgaaagcaaagacctattcagtaaacggaggtacgtttcgcgatatccaaaatgctattgacaaaagcagcgcgggcgataccataaaattaagcggtaaatttgtttccaagggtgatgataccatctctatgtcaaagaagctgaccatcacgagcccgtcccaggccatcctggatggtaaaaatagcacaaccattttaaaaatatttacaggagcaacacagagcaaactgtcgaacctgcgtttcgtaaacggctattcggacagcaaaggcggtgcgattgtcatttcagcgaagtcaattgcctttgacaagtgcgtgttcgaaaacaactacgcaaacctcagttcgggcgccatccataccccgtaccgcgcaatagcgacccaggggatgctgatcaaaaactgcaacttcaccaacaatggggcaggaattgccgcgggagcgttaggcatcttcggccacgattttctgatcgagaactgtgcgtttagttccaactacgtgaaaggctatggcgagtgctacggcggtgctatccagataggcttggatacggaaccgtcttatgggaatgttcggaattgccgtttcattaacaataaggctatctcctcgactggcctgggccatgccggggccggatgtgtgcgaaacggttcttcctattataactgtattttcatcaacaatagtgcggattggggggctgctctgacctatcacgcctcgggcaacctgaacaactgtacgctgatcaacaacaccgccacgaagtatggtggtgcggtagcgattatgatgaactacctgaacttcatgaatttaaatattaccaacagcattttcaaaggcaataaagcgcctctcggcggtgcggttaaattggatgggctgaacataaaaattgaagaatccacctttgatgataattatgcctctgagtatggcggcgcagtgaatatcaacgcaacaaacgttaaaatcataaattctaaatttaaccgtaatattgcaaacattgatggtggtgcggtattcatcaaaggtaaagacacgaccgttaagaatagtaaattcatctccaacgaagccatcccggacgtgaaaaaactgaatgatggcctgggcggcgctatttatgtcaacagtacaaaggtgctggctcagaacaatgagttcaaactaaatacggcgagaaacggaagtgccatttactttgataggaatgggcttgaatttaaactggtaaacaataccctgtaccaaaatcaggcgtgggtttaccgtctgccgatttttgcgcacgatatctattatggggagtcagaaaacatcaaaagcgtcatttacggcgggaataacattgcggactttgataacctcaaagtgagcaacgcaatttacaacgcagccagcaataacaagattgagattgatggggagcacccagtgctgggcgcaactaccagcgggaagttatatcaggatgaccgtgagtataacgtgcgcgtcctgatgatggtccgccatgaagatggcacgattgtgtacaacaactctctgaacactaactatctcggtgcagtgtcgggtaagctggataacttaaagccgggcaagtactatgtgaccgccaaacacttcgaagacaactactacaaagcgattgccaataccaccgtgttcaatgtgcttcccaaaacggataataaaatcctgaaatcaagtaacggaaactccattgcgtataaagacaccgtcatctggacattgaatattaccaacaatggtccgaacgatagcaccggtgttgtagtatatgacgtacttcctgagggcctgatctgggtgaacgacgacagtaatggagcatacaatccaaaaacgggggtgttaacaatcggctcgctcaaagttggtgaaactatcgtgttaaatatcatgactaaagtgaatgcgaccggaaaaattgtaaacaaagctaacgtcacgggaaatgaatatgacattaacctggacaacaatcatgacgaaaaggaaatcaacgtccctcctaccgtggatttggccataattaagaaggtcaatatcaccacgccaaactatggtgattcggttatctggacactcaccgttagcaactccgggccggatgtggcccatgatgtaaaagtcaccgatattttctccgactcacttatctggatcgaagatgactctctgggcaaatataacccgaaaactggcatctggaacatcggcactctgaacaaaggcaaaaccattgagctgaacattgtctcacaggtgaatcaaacgggaaacatcacaaacaatgtgtcggtgacctcgcgtgaacacgatattgacctgtcaaacaatgtcgctaataaaacgatatttgtgattaaaagtggcgacttgtctattctgaaaaccgttaatgtaagcgatgcgaactatggcgaaatcgtgaaatggacgctcactgcctataacaatggtcccaacaaggttaatggggttaccgtgcaggatattcttccgaaaggcttaatgcttcttaactacacggccagtaaaggattttacgatgacggcgtatgggttgtgtgctgtcttgaaaaaggcaaaacggagactctggagctgatctgcaaagtcaaccgtacaggaaatattaccaatattgcgaaaatctcaggcatagaatatgatccgaatctggacaataacctcgacaatgaatctattattgtgccacctgcgtcggacatttccgtcataaaacaggtggacagtaaaaatccgtacttcggcgatattatcacctggattattgaagttaccaacaaaggtccggaccgcgcaactaatattcgcgtcacggatgaattgccagaagggttaatatttaaggactacgttagcacttgtggtgtttaccaaaacggcgtgtggttcttagactatctcaacgcaggtgatagtgaatatctaaatattagttgccatgtcgggcaattgggcattattgtaaacgatgtgagcgcaatcgccaatgaatttgacattaacctgtcagataatcattataatgagagcattaatgtattgccggtctccgatcttagcattgaaaaatttgtcaatgtgtcaaacgcgaactataaagatttgatcaaatggaccctgatagtttcaaataatggttttaatgatgcaacggatgtggtggtggaagatatcctgccggattctctggaatttattagtgccaacggtgattatgaggagggtatttggtacgttggtgatctgggtgttggtaattcgaagaccctggacatcgtgacacgcatcattaaaacaggcgacattacgaatgtagccgcggtctattgcagcgaagacgaccccgatttgtcaaacaatgaagctgaggataccgtgcatgtggggcctgcagcggatctgtccatcacaaaaaccgtttctaaacatgcatacgaaattggtcaaattctgacttacaacattaatgtaaacaacaatggtccggatgacgcggtcaatgtgaaagtgagtgaagaatttccgaaatctttacacctgaaaagctttaagatgtccgctggtgaatttaacgcttacagtaatgtttggtccatcgataaacttgccgcgggtggtgaggagaaattacgcatggaatttgaagcgctgagcgaaggcatctttaaaaatacggctagcgttgtaagcgatacgttcgataatgatttgaataataatcatgactcggctctggttaaaattattgcgaatacttccgataagatcatcaacgatctaacggacaactttactaaaagcaatgttgttaaagcggaaaatatcaaacagccagtttattgtcttgaaaagcactctacggccaatttcatcgaactgctaagcatctctgtcattgtttcgatgattttcggcggcggtgacatttttcgtaaacgg

SEQ ID NO: 76619 - DNA, 987 bp, synthetic construct
  source 1..987: mol_type = other DNA
gcatcaaaaactgcattcattacctctgataatctgatagacgaaaaaacggataccaatatgctaaattcgattaagaattacgtggaagagatcagtaacggtgaaattcaggtaatcgtcgataacgaagcgccaggacctggcgagggttggcgctcaatttctgtgacgagcgatgtgagtattgacatcgccgcctcggatgctggaaactacatacagctggcatctgccgccaccgcgggcaacaaacaaattatctttatcaacacgggtgatttcgacctggataaccattctaatttcttgcgccgggcgtgggatgacaactatagcaatgagtcccttgcaggcgtgcgtgaccccggcacactgcttaacaatgccggcattcagtatatccagctggctaaggactatccggacaacattgataacaatggtctgctggataagtacgatgataagatgaaccacgaaatcgctgagaaaatcgtcaacattgttaacaactatgacaacagttcgaccaaagaactcagcgataatttaatcgtaaaaaacaaaatatccccgaaaggcatggcggatgcgagcaaaatgctggtggaaagcggggataaagaaatgaatggcccgtacggttcctattcaaccccgcaattactgtatcagaccagcacttacctcaatggtgatgggattgacattcctaaggactataaaaaaccggacaacccattaggaatttcctttctgaccaaggacacgtacagcgtttatgattacttcaaaatggcaggcattgtcaaaaattacatggatgcgaatgggaaagcgccggattcgattgaatatgaaggtgcccatatcagctattacgatttgacatataattttgctaaaatcgttcaaaatcacactgacgcgaatcatatgggctttgaaagtgagtatcactttgataaagttaacgattcaatc

SEQ ID NO: 76620 - DNA, 84 bp, synthetic construct
  source 1..84: mol_type = other DNA
aactccgcaccggttctgggaggttatgaagccaccggcctggggcagaacggctttggctcggcgagcagtgtgggtttaaat

SEQ ID NO: 76621 - DNA, 60 bp, synthetic construct
  source 1..60: mol_type = other DNA
aacccgacgctgggcgcgaattttatcactttcggtgctaccgcagtgattttacaggcc

SEQ ID NO: 76622 - DNA, 33 bp, synthetic construct
  source 1..33: mol_type = other DNA
tatattggcgtggccccggatttagcgatcctg

SEQ ID NO: 76623 - DNA, 42 bp, synthetic construct
  source 1..42: mol_type = other DNA
gggtggggcgtgagcacctttccgtacagtattggttatgtt

SEQ ID NO: 76624 - DNA, 54 bp, synthetic construct
  source 1..54: mol_type = other DNA
ctgaacccattgattcgcccggtgacccatttatttctgatgggcagcagtaaa

SEQ ID NO: 76625 - DNA, 192 bp, synthetic construct
  source 1..192: mol_type = other DNA
tttcgcctgcagatgggcatcaaactgaacacggtgttttgctctatgtccagcacgatgagttcgacaagtattctgcatactcacttgttaaagtcaatcctgggtgaagtacttaccaaaataattggtccattcattcaaagcaacatcaataccggggttggcctctatgcgtacgtcccggatatt

SEQ ID NO: 76626 - DNA, 216 bp, synthetic construct
  source 1..216: mol_type = other DNA
gctttcgcgggtgccgaaccggattattatacggtggagatcgtcaacatgaccgataacgttgattttggcgacattccgattgagaaaatcagcaatgaaacctatcatgttgattccaactacaatgaaatggaattaattaacgacctgaaagtaccactgaataactcatgcaagtactacactgtgtcgtggaatgcatatagttatttg

SEQ ID NO: 76627 - DNA, 33 bp, synthetic construct
  source 1..33: mol_type = other DNA
attggctttagcaccgtggatgggggtccgttc

SEQ ID NO: 76628 - DNA, 45 bp, synthetic construct
  source 1..45: mol_type = other DNA
gcgacctgggacaacatgtggggcttaggtagccagacgctggat

SEQ ID NO: 76629 - DNA, 42 bp, synthetic construct
  source 1..42: mol_type = other DNA
accaactttggccagatcacgaacttcattagcattaatccg

SEQ ID NO: 76630 - DNA, 1380 bp, synthetic construct
  source 1..1380: mol_type = other DNA
gacaatacggaaagtgacattatcggcgccgacgggctaaacagcacaagcaatatccccatggatgctccgcgcacctttactcagctcaatgaagcgataacgccgtacaccagtattgatctggagcatgattatcgatacgataacgagaccgattccgaatttgctaacggagtgccgattaccaagaacatcactatcgatggtaaaggtcatacactggatggcaactatctggcccgtattttcatcatcaaagaagattgtacggcagtttttaagaacatcaacttcattaacggtaaggcgagcaccaatggcggcgcaatctatggcgtgtgtaatgcggaaaactgcaacttcctgaacaatactgcggtgaaagacggtggggcaatccacctgagtaacgccaataactgcaattttattaacaattacgtattaaatggccgggggggcgcgatgtataaaggttacgcaacgaactgcatctttacggacaactccgcagtgacgggcggagcactgtttgaaaactctgcgaccaagtgcaagttcaccaataattttgcgaaagagaatggtggtgcattgtatggaggattcgctgtccagtgtaactttaataagaatagtgccaagaacaacggtggcgcactttataaagggtcagcccactactgtaatttctcagacaattatgcggtaaatcatggcggcggcatgtatggcggtgccggggagtactgcttctttaaaaacaacgccgcgaaatcaggccatgatgcgtaccgcagctccctcaaaaaaacgaagacaactatttacataaagcctaccacgacggcccattatggtgattatgtagtgataaccttgaaaaacattaaaaacaaagttgtgagcggtgttaaggtctctgtttttattaatgggaagaaatatgctaccaaaatcaccaacaaatatggtcaaatcaaaattgacacgcgcaacggttttgttattaaaaaatacactattaagtcgaagtttgcggaagattctaactactacgcgtcatcgaaaacagtgaaaattacgattaaaaagtcgacaccaaaaataactgcaaattcgaaaaccttcaaaaaaagcacgaaaatcaaaaaatacagcatcaccttaaaaaccaaacagggaaaaattatgaaaaacaaaaaaattacactgaatgtcaatcaccgttattattatgcgaccaccaattacaaaggcatcgccacattcaaaattaccaaactgctgtataaaggtaaatttactgctaccactggctatgctgggtctaaatattacaatgcccttacgaaaaaatccaccattattgtccgt

SEQ ID NO: 76631 - DNA, 36 bp, synthetic construct
  source 1..36: mol_type = other DNA
atcattccgctgccatggacccctgtgccggttacg

SEQ ID NO: 76632 - DNA, 51 bp, synthetic construct
  source 1..51: mol_type = other DNA
attccgtggttcgggggtatgaccggtggctttgaaacgctgttaggcagc

SEQ ID NO: 76633 - DNA, 36 bp, synthetic construct
  source 1..36: mol_type = other DNA
aacctgacccagggcacgagcgtgggtattgttgat

SEQ ID NO: 76634 - DNA, 156 bp, synthetic construct
  source 1..156: mol_type = other DNA
tacttctactcgtcagataactttcacgagagcgactctagtttaaatgaacgccatgacgatgtggtttatctgtggatgcttgatgataacggcaaattgaaactggtcccgacgaccgaaacttattccgaaggtagtgcgagcgatccagac

SEQ ID NO: 76635 - DNA, 1095 bp, synthetic construct
  source 1..1095: mol_type = other DNA
ctggaaaataaaatcaacgcaggctacggttccaccatcaccctggagaatgattatgaatatgaggagtcgggctatagttctggaatagaaattactcaggatatcacgattgatgggaaaggtcataccatcgacgccaaagggcaaacgcgtattttcgatgtggaagcgggcaaggtaaccttgaaaaacattacctttaaaaatggaatgcaaaacttcttctttggtggtggcgccattctctggaagtcacttgatggcatcattactaattgcacttttatcaataactatgctccgtctggtggagcaattcgcctggaagcctgggacaataccatatctgattgcaccttcatccgcaacacggccaatcagggaggcgcgatcaacctgaatacaacgaactacgcttcaatttccaactgcgtttttgtgaataacgatatttactccgtgcagggtgatggctgtaaaattaacaacaacattttcatgagctgtagcattggttttgacttcacccgtaactataacattgacaataattggtttgggaataacgcgagtaattatacttacaaaccgaatgagttttgtaacaactggttgttcctgaatgcaacaaccgatcccaacacagtcagcgttagcaacaccgcggacattatctttaaattatacgcgtataactcaactagcggcaacatctcgaagtatgataatgcgccgtttaaaaacctgaatctgacaatcaccgcaacaaatggtaacattgataagaatattgctaaactaggggaaactatcaaatataccgcgtccagtgtcgggacgggcaacgtctcggccaaagtggaaaatgtagaatataccattggcttagacatcattccaatcgaaaccaagctgatacttaactcgaccgacaccattattgacagcatcagcacggttggcatcaacgtaactgatattaataataatccgctgagtggtgtggttaaactcacaatcaaagataacaaaggtaatgaatacaacacgacggtcacggtgaaaacgggcattacgacctacatataccct

SEQ ID NO: 76636 - DNA, 1161 bp, synthetic construct
  source 1..1161: mol_type = other DNA
aatatcactggtttttatctggggaatgataccttagggtatgttgattcgcccgtcgcagaaaccaagtttcgcgtggataaacttaacgctaccgtcaacctggtagtgaacaattacacaatccgcaacttcagcgtcaacattacagtaacgggtaaaaataccgaccggattgtggaaaatggtagcctgatcatctatgccaatcgtgaaaaaattgacgagatcaatattaccgacggtaaagcggaaaatattttactgaatatcaccaaaataggcaactatgaactctccgttgcgtatagtggaaacaacgtattcaatgaaaacaatacgttttcaaaaaatgtgacggcgataaaaatcagtacgattatttcagccaataacattatcactacgtataacacggataaatacctggagattaccttactggattcggagaaaaatccgctgaacaatgcaaccctgtcggttgacttgaatggggctaaaaagtacaccacttataaaaacggacagataaaaatcgcgctgggttcccttgttccgaaaacctacaccgccaaggtaagttttgccggcaatgatatttatagcccgtattctaccagctttaaggttgtggtggaaaaagcgacaccaacaattaccgcgaaaaccaaaatctttaagtttgaggacaaaaccaaaaagtatacgatcacgctcaagaacaacaaaggcattgtcatgaaaaacacaaaagttacgctgactattaatggcaaaacctacacggcaacaaccaacacgaacggtgtggccactttcaagtttaataaactgaataaaaaaggcacctatactgcatctatcacatattccggcgataaatattacaacaaactcatcaaaaaagctaaaatcaaaatcaaagcacctgcctggaaaaccgtggcgaaaggtagcaaaaataaggcgatagtgaaaaaaattcaaaagacgttgaaaaacaacggatactacctgaagtacaacggccgttacttgaaaattgatggcattttccagaaatatactcaaattgccgttaaacatttccagaaagcgaacaaacttaagaccacgggcaaagtcgattacaagactgctaaaaagctaaaaattatt

SEQ ID NO: 76637 - DNA, 48 bp, synthetic construct
  source 1..48: mol_type = other DNA
atggccgatcaaattgcgaccttgatcagtagcgtgggcctgacgcag

SEQ ID NO: 76638 - DNA, 42 bp, synthetic construct
  source 1..42: mol_type = other DNA
agcggtttgctgggcggcggtcaggggctgccgaccgaagcg

SEQ ID NO: 76639 - DNA, 81 bp, synthetic construct
  source 1..81: mol_type = other DNA
tttattggcgatttcccggagcgcatcgccggtttccgtctgccaaccgtgtttgcgccggttgaagcatttaaacatcct

SEQ ID NO: 76640 - DNA, 51 bp, synthetic construct
  source 1..51: mol_type = other DNA
ccgggcatgccaaccagtaaaacgctgttatactatgttagccaggtggaa

SEQ ID NO: 76641 - DNA, 45 bp, synthetic construct
  source 1..45: mol_type = other DNA
ccgatgaaaattccagtggcgaaaggcgttgaaatcagcattatg

SEQ ID NO: 76642 - DNA, 123 bp, synthetic construct
  source 1..123: mol_type = other DNA
tcagtcatcccgctgcatccatatgccttcgccatggcctccggtgttggcagtgcaagcatgaacgctgcttcgctggcgccgaccgtggcggcgtttcctcagttagcaacgcaaattgaa

SEQ ID NO: 76643 - DNA, 45 bp, synthetic construct
  source 1..45: mol_type = other DNA
gtgccgcagccggcgaccccaacgatcggcgccattttaaaactg

SEQ ID NO: 76644 - DNA, 45 bp, synthetic construct
  source 1..45: mol_type = other DNA
attccgctggccagcaccggcagttgggaagcgttatttgatctg

SEQ ID NO: 76645 - DNA, 39 bp, synthetic construct
  source 1..39: mol_type = other DNA
attagttttaactgggtgctgaatagctatggcaactta

SEQ ID NO: 76646 - DNA, 99 bp, synthetic construct
  source 1..99: mol_type = other DNA
atgtataacaattacatggacgatctgggcggtgaaattaagagcaaagaagtgaatgagtttaacaaccagctgaatgcgttaaaagtttatttcaaa

SEQ ID NO: 76647 - DNA, 51 bp, synthetic construct
  source 1..51: mol_type = other DNA
tatagtaactttatgcagagctacggcatggaatcggagatgattatctcc

SEQ ID NO: 76648 - DNA, 36 bp, synthetic construct
  source 1..36: mol_type = other DNA
atttatccgtcggcgtttaacagcgaaaccagtgtg

SEQ ID NO: 76649 - DNA, 42 bp, synthetic construct
  source 1..42: mol_type = other DNA
acgatgggtgtggaaaccattgttcgcattatcctgggcttt

SEQ ID NO: 76650 - DNA, 450 bp, synthetic construct
  source 1..450: mol_type = other DNA
actggttcaaccaataagtcgagcccgattcagaatgttgacacggaaaaatatagtgcaggctcattttccttcaaatacccgggtgactggcaggaactgaaccaaacggatgaagaacatccaggcgccatcttttataaagcagccaacaacacaactgttgagtattacaatgtgagcagcagtgcctcatcgctgaaagaaatcaaccagaatcggatcacccacgcgcaaagtgtaggggcttctgtcaccctcctggaaacaataacgttggatggtcgcaatgcgagcaatattatcttagagaacgcggatggaaactacacccgttatgtaagcatgtttagcaacggcgaactgtatgtgttccgcctttctggcgattccgtcaattccattacctcggatgagattaatagtgtgattaactctgcggacattgct

SEQ ID NO: 76651 - DNA, 72 bp, synthetic construct
  source 1..72: mol_type = other DNA
gcgacgttaggtggaagtctgttcggtatttttggcggcctgactggctttaccttgtccgggatcaccagc

SEQ ID NO: 76652 - DNA, 45 bp, synthetic construct
  source 1..45: mol_type = other DNA
gggtatctgggtaccttcaaagaaggcttttttacgactgagaac

SEQ ID NO: 76653 - DNA, 318 bp, synthetic construct
  source 1..318: mol_type = other DNA
gtgggttacagtattgtgtcatccagtatcactaacgatatctcctcggggacccagtatgacgagcttgccgagctgaaagctgaatacagcaatttgtcggtcaaattcgataacattaagtcaacgtactatgcaggcgatgcggatgacgttaaagtttataatgatgcgaaactggagttatctcgcgccaactccgcgatagaaaatgtacaaagcgccctggacgcagataaaccgagcaacgacgtggatagccgtattgtctttgctaaagaaaaactggaatctgcagaaaaggcgtataatagtctc

SEQ ID NO: 76654 - DNA, 540 bp, synthetic construct
  source 1..540: mol_type = other DNA
catattttcttcggcatgccgctcgaattttatacggagggggatgccacttaccatttgtcgcagtttaacaaactggacctggacggtgatggcaaccttaccttctatgaagtcaaaggtttagcaagcgatatttcgcaggataatctatcggggatttttgacgcggccgataaaaataacaatggtgttctgaaaggatctgaatttgacggctatctgcagttcattgacaaatattataaagaattaggaaagcagcagaaagctgaacgtaaaaactcagcacaacagaagagtagctcttccagcagcagctccaatccgtcatttcaagatgagggccacgaaatctgcccagtgtgtgggggcaatcagtttaccgaattttacaactcccaatatggtgaaatgaactggcaatgcgattactgcggtgaaatctttcgcagtgatgatgagttctacattgactactgggaaagtaacggcattaagtgtatattgcctgcgctggagaataatctggatatcatc

SEQ ID NO: 76655 - DNA, 138 bp, synthetic construct
  source 1..138: mol_type = other DNA
gatacctattttggcctgccggagcagccaggtgtgcgcggcgctggcatcattggtcaggatgttgaaaaacgtgggggggacattgcgggtggatttttccaaggcaacatcacgtgcagtccggatgccagcgca

SEQ ID NO: 76656 - DNA, 270 bp, synthetic construct
  source 1..270: mol_type = other DNA
ctgaacccggatcagctttacgtccgccctgccccgcaggagcagattggcgatggtttgagcatcgcaccttacgaccggggtggcgaagtgttaactcagccgggtcagattaatccccaatatccggacaactcccgtgaactgggcatgatcaccgcgtatatgagcccaatcagtcaatgggtttctagcatttcgccatactttggaacgtcaatttatagttcgccgggcgggctcatagatgaaatcctgtattatacccgc

SEQ ID NO: 76657 - DNA, 48 bp, synthetic construct
  source 1..48: mol_type = other DNA
atggtgtttattccgcagtttgttccagccgcgttcctgaacatgtat

SEQ ID NO: 76658 - DNA, 72 bp, synthetic construct
  source 1..72: mol_type = other DNA
atggactttgttactcttggtggcaacttattgggcaccatcccgctgggggatattgtgctgtatctgacg

SEQ ID NO: 76659 - DNA, 54 bp, synthetic construct
  source 1..54: mol_type = other DNA
gcctcgaccggcacgctgtccctggcggtgttaagccagatgccagttagtccg

SEQ ID NO: 76660 - DNA, 66 bp, synthetic construct
  source 1..66: mol_type = other DNA
gtgaccggtagcatgaacattggcgaaatcattacgtatcagagtgttaatgggccgctggtcttt

SEQ ID NO: 76661 - DNA, 42 bp, synthetic construct
  source 1..42: mol_type = other DNA
gttaaagtgatcaacattggctttctgggtatggaaaccccg

SEQ ID NO: 76662 - DNA, 57 bp, synthetic construct
  source 1..57: mol_type = other DNA
ttaccgtcgccagcgtactatacgggcgatagtagcctggccttcgtgtttacccag

SEQ ID NO: 76663 - DNA, 252 bp, synthetic construct
  source 1..252: mol_type = other DNA
gcctctgacgttaacagcaccgacttctcccaactgaacgacaccgtgctggattcaagctttaatgataatttgagtacggttgaaacttccaacaactcgaaaacagtcaataacactaacaatggtgatatggtacagattattaaaaccaatccgaaaatcacggtgaagtcaacctatcttaaaagtaaagataaattagagtttaatttcaagaatgcgtcgggcaacccactgaaatctaaaagc

SEQ ID NO: 76664 - DNA, 48 bp, synthetic construct
  source 1..48: mol_type = other DNA
atggtgtttattggcaacaaaaagtatagcgtttacaccaatagtaaa

SEQ ID NO: 76665 - DNA, 48 bp, synthetic construct
  source 1..48: mol_type = other DNA
aacaaaattatgtatttacgcattagcaaactgagtacccgtatcacg

SEQ ID NO: 76666 - DNA, 99 bp, synthetic construct
  source 1..99: mol_type = other DNA
aaaaaactgattgttaagtacaaagggaaaacggtgaccaaaacttccaacaaaaatggccgcattagctataaaatcaagtcaagtggttcgaaacat

SEQ ID NO: 76667 - DNA, 78 bp, synthetic construct
  source 1..78: mol_type = other DNA
tcttcaattagtaaaaaaaccatcgttattaaagtggcgagcaaaaaatttagtaagaagtcctcgagcgaaggcatc

SEQ ID NO: 76668 - DNA, 159 bp, synthetic construct
  source 1..159: mol_type = other DNA
gaagtgcggaaaactcagtcgaccaactactattgcggcccgaacagcgccagtgtttgtacgcaggtcctgaaaaattattactgtgaaaaatatctggcgaagttaatggggacaaatcgtcgcgagggtaccaaatgccaatggatcattgatggc

SEQ ID NO: 76669 - DNA, 42 bp, synthetic construct
  source 1..42: mol_type = other DNA
tttgataatgccttaaacgaactgaaaaaaggcggtgcggca

SEQ ID NO: 76670 - DNA, 33 bp, synthetic construct
  source 1..33: mol_type = other DNA
aacaccacggcgggcgccgatgtgctgagcatt

SEQ ID NO: 76671 - DNA, 33 bp, synthetic construct
  source 1..33: mol_type = other DNA
agcgaaattggcctggatttagcggtggttccg

SEQ ID NO: 76672 - DNA, 87 bp, synthetic construct
  source 1..87: mol_type = other DNA
ggcatggttgattttacccaggcgttaacggccaatgtggtcgaaattccgaaattctacctgccatttatgaactataatctgaac

SEQ ID NO: 76673 - DNA, 48 bp, synthetic construct
  source 1..48: mol_type = other DNA
gcgaccctgtccgttgtgtatggcaacctgagcttagccatgagtggt

SEQ ID NO: 76674 - DNA, 45 bp, synthetic construct
  source 1..45: mol_type = other DNA
tcctatattctgacgggcagttactactatagcggtgcgccgacc

SEQ ID NO: 76675 - DNA, 36 bp, synthetic construct
  source 1..36: mol_type = other DNA
accggcgattattattacccaaacagcccgcaggac

SEQ ID NO: 76676 - DNA, 36 bp, synthetic construct
  source 1..36: mol_type = other DNA
tttggcgatgcggtggataactatgttgacagcctg

SEQ ID NO: 76677 - DNA, 33 bp, synthetic construct
  source 1..33: mol_type = other DNA
tatcagggtccgcaaaacattcgctttagcggc

SEQ ID NO: 76678 - DNA, 1701 bp, synthetic construct
  source 1..1701: mol_type = other DNA
gtggacgcggataacgcgacgttggctgaggatgcaattccgactgatgcggacgttgtgcagacgaaagttaacaacgccaattcaggagataccattacattggaagacaaaacatatgactttgcgaatcagaccgtaacaatcgatggtcgtgataaaatcaccattcgcggtactggtaacaccatcattaaagggcatgggggccaaaactcaaagacaggtgcgctgtttatagtctcggaaagtattggtgtaacttttaaggacatcacgttcattgacaccaaccccaacaacaatttcacctacgatggtaacgtggaaggctatggtatcacctttgatggctcaggtgcggagaatggcgttgtcgataattgcagttttgccgattttaatacggcggtgaacgtgaaaagctgcaattatgtcactgttaaaaacagcaaattcagcgggggctatgcgaccaaactgattaatgatccgacggtcaacaaggaaaagggttctaaagttgtaagtgcgggtggctccctgttcctcagcgtgctcaattgtacgtttgatggcccaatgctagacgcagtatccatctatggcggcagcggcgatgccaagataattggcaataccttcaaagacaacgtctatgccatcttctttgggggcgcatccactgaagggactttcatcaacgataacacgttcatcgaatgtggccaatttgtgaaagatgccaataccacgtggggaggataccctgtaatcagcatagaaaaagcctccgatagtgtgtacatgaataataacaccttttatgcagtgaacaacaacaaactgattgcagcggaatcggcgaacactgcgcatggcgctccgagcacgctgggcgatatcaacatcaccaactcgaacgtcaatcttgctaatgataatgtggtggcgggttcggtcacgttcttacacatcctgagccggacgggagacatcaacccgaaagcccctattacgcttacaggcaataagtatgccaaaggcgtgaaagctgttgttgtatggtacaacgactggggtgttgaagattcagagaatattgtgattccgcaggccccggagccaactcccgctccggtggctgtttcaaccagcatttcttctgcgaatctggccatctatgccgggaactccggcaagattaaactcacgttaaaggatgcaaatggcgtggccgtggcgaataaaacggtcaacattgtcattgacggcgttgccaaaactgtcaccaccgatgataatggtattgcaattttgtctgttaagtattctaactcgggaacccactatgccacgctggctttcacaggtgacaacgactacaccggaagcattaaaacagttaaaattagcgtgctgaaaaaagtcaccgctctgaccattacgaaaaaaacatttaaagtgaaaaccaaaaataaaaaagtaaccaccgttctgaaatcggggaaaacagttcttaaatacaaaaaggtgaccctgaaagtgaaaggtaaaacctacactgcaaagaccaattccaaggggatcgcgacgtttaatatcaaaatagcgaaaaaggggacctttaaagcattaactaaatttgcgggtgatggtgcatacaaagcagcaagtaaatatagttacgtatatgtacgc

SEQ ID NO: 76679 - DNA, 57 bp, synthetic construct
  source 1..57: mol_type = other DNA
gatagtacgaaatcgctgaactataccagctttaaagcgttcttaattctgactccg

SEQ ID NO: 76680 - DNA, 60 bp, synthetic construct
  source 1..60: mol_type = other DNA
atgattatccagggcaccgagactttaacgagtatcattcatattttttccgaaagcctg

SEQ ID NO: 76681 - DNA, 51 bp, synthetic construct
  source 1..51: mol_type = other DNA
ccgggtctggcagctttagggacgggcgatattgccaccctggcgcagagc

SEQ ID NO: 76682 - DNA, 177 bp, synthetic construct
  source 1..177: mol_type = other DNA
gcgttgtctgtgaatccagatatgattaccgagcagacccagacaaaggaagtctcaactgcaaacacctttacgcaaaactatactgatgccggtggcctggaagatagtggatattccgaagttggcaaagtgtacgaggacccgtcgacgggtaaactggtaatggttagcggg

SEQ ID NO: 76683 - DNA, 306 bp, synthetic construct
  source 1..306: mol_type = other DNA
tttcagtttaacaataacgtgagcacattcatgattgtcaatgaaactcatgtaaccgaaaacagttcgtttagtgggatgctggtggattcttacggcaatggcgtagcgaatcaaaccatcgcttatcacgaaccgggtgggaatgtgggcaccttaacgacggatgaaaacggtgagtttacggttgaattggccaaatatctgtccaactcaaccagcgacaactattacggtgatttcaagttcagcggaaacggcaaatatcagggatgcgcatacgagggtaatgttactgtcggcatt

SEQ ID NO: 76684 - DNA, 42 bp, synthetic construct
  source 1..42: mol_type = other DNA
gcgtataccagcccggaaatcctgaataacattaacacgagt

SEQ ID NO: 76685 - DNA, 69 bp, synthetic construct
  source 1..69: mol_type = other DNA
accgccttatcgggtgcgatccaaagcgacatcagtaacccgattcaggatctgattaattccacgggc

SEQ ID NO: 76686 - DNA, 45 bp, synthetic construct
  source 1..45: mol_type = other DNA
ctgaacagcagtgtgacgaacttaatcaccggcactattaatccg

SEQ ID NO: 76687 - DNA, 90 bp, synthetic construct
  source 1..90: mol_type = other DNA
ctggcgctgttttcgagttatattttgccaggcccgcttgatgtggttaatagcgccttagtcgtaatcgaaaacggtaaactgctcacc

SEQ ID NO: 76688 - DNA, 60 bp, synthetic construct
  source 1..60: mol_type = other DNA
ggctcgagcagtggtctgggctatatgatcctgattgcgaccaacttatttgatacgggg

SEQ ID NO: 76689 - DNA, 2904 bp, synthetic construct
  source 1..2904: mol_type = other DNA
gataccgacctgaacgcaaataccttagaaaaaagtaacgatgtgaccatactgaatgaaggcgatagcaatgtgagccagatacattcacaacacaccgttaaagtgggctcagatagtgattccatccagaatacaattgattgtatgaacgatggggacatactgaattttgagaccggaacctacaaggacatctgtatttatgtaaacaaaagcattacaatcaacggtaacggagcggaattaatcggctatgacacgccttctaaaagcaacactcctgagatcatctacaacgataccggtaaaggcgggtatgcaattgggaattttgcgacgctgtacattgttaaggcggacaatgttgtcattaatggtttgaagatcaccggcggtgcgaatagtacgtccacgtattctaatgcgttaatctatgcgatgaactccaaaaatctgaccttcaaaagcaatgtgctggaggggtcttcgtggggcctgtacttccagtactgcactgacggccatgtaaccaacaacatcattaaaaatcaggcagtgacgggattcttgaactttgggtctgcgcgcacctcaattgaaaacaacaaagtcatcaacgctaaaaaccatggcatcgatgtccgtcatggtaccggaccgaacgtgaagatcattaataacacagtaatcggttcaaaagaagggatctatctgatgcactcgaccggccatgttgcggctaacaacacgctgatcaactgcactattagtagcatcagttgttacggttcgaaaaacatcaaactcaacgggaataagatgcagaaatctcgtattggcgtgctgctcggcggaggatacgagaacatcacggtgggtgaaaacatgtttactctggataaccttccatatccgcccacatttgcgtattatattgccgaagccaaatctgaataccagaacgatgaagatataatgggtacctttagcgacagttcgctgtatactccgaactttgtagcatttacgggcattgacgtccctaaagatattggcattaactatgatcccattctggaaaagacaggacccgaatggatcgttccggaaggcgctagcagcagcgagattcaaaatatgatcaataatatgaacaatggcgacacgctaagcttcacccagaacgctatttacaatgaaatttccatctacaccgacaaaaacattaaaatcctgggtaacaatgccactctggtcggctgcagcgggattaacttcaacaacacccactacttggataatgtggcggagaaagtgcgtaaatcaactaatgagggtgggtatgcaatcggctacaatgcggtcctctacatattgaacaccaccaatgttgtggttagtgacctgaatattaaagcccaatacccgaaatatgattctagcaaagttgaaacaactactaacgagtataagacagtggggatttatgccgactccaacagcggcttagtaattacgggttgtgacgtgaccggtgcgtcgtggggtattttccaacagtattgcaaaaatagcaccattatccgcaacaatatccatgacatttacacgaccggcattatgaactttggttcaccgaatggcattattgccggcaataccgtgaccgatgccgccaaccatggtatcgatgtacgacatggtaccggaccgaacgtgacgatctttaataacacaatttcaggtgcaaaagaaggaatctatcttatgcactcaaaaggccactcggcgtacaataacacgattctaaactgcaaaatcagtgggattaccgcctacggctctggcaatgaagtgctttttaacaataccatttcgggcagtagacttggtattttgctgggcggcggatattacaatatcaccattggtaaaaatacattcaagctggatagcctgccattcccaccgacttttgtaacgtatcttgcgcgcgcggataataaatatcagtcggaagacgatgtcattcgtacctactccgataaggaaactgcagcggttgatgctaacgacataactgtcgggtataaaaaaggtgaatttaacatcacgctcatcggacagaatggtgataaactgtcctatgaagatttatccatctcgattaacggtgcgaatttcacagctaagaccgatgagaagggcatcgcagttattccgctctcattaacaaccggcatttataatatgaccattaaatttgccggtaatgacaattatgccccgataaacgtgactaaaactgtgacagttaatgatgaccggattaaaaccattttatcggccacgagcaaaaccctttacctgacgatcatttctaaagggtattcatacaaggtcaccttcaaagatatgaatggcaaggcaattgccaataaaaaaatcagttttaaaattgatggtaaaacctatagcgcaacgacgtcgtcaacgggcatagctaatattaaaatcaaagctacaactacgggcaataaaaaagccaccattagctttaagggtgatgataagtatgcgccagtcactaaaacgctgacggtaaaagttataaaacaatcctccaaaatcagcgcttataaaaagacgttcaaagtcaaaataaaaactaaaaagtacaccattactttgaagaacaacaaaggtaaagcaatttacaagggcacggtgtatattaaagttaaaggcaaaacgtataaagccgttaccaattctaaaggtaaagcgacatttaagatcaccaagctgacgaaaaagggtaaattcacggcaaccatcaaatattacgggaacaaatattacagttccaccagtaaacaggtgctgatccgcacacgccgt

SEQ ID NO: 76690 - DNA, 1629 bp, synthetic construct
  source 1..1629: mol_type = other DNA
gcaaatgacaatccaaataactcggatgacatttccaattatcaaatcagttctgatctgtctaacacggaaatccagacaatgttggataatgcaaaagaaggagatcagttcgaatttactgaccgtgaatataagaacatttctttagtggtcgataaaaagctgaatattgtctctaaaaagaatagtaacattcatacctccaataaaatcgctgataaagcccgcaatctgggattaaacaactcgttcggtttttatttcacgtcgaacagtggcggcagtttcctctatgggctgaccattataagcaatagtgactacggtatcgttgtggataaaagcgataacacgaccattaaaaatgtggtgatcaagaacgggaacgtgggtattttggtcaaaaactccaataatgcggatatcattcagaataacatcagcaaagcaaactccaacagtattcatctggaaaatgtatcgaaaagcataatctcaaaaaatacaattagctataatgggcgctctggaatccatgcgtccaacatatactattgcaacgtaaccaacaacacggtgcatcacaacaaatttaatggaattagcttgtacaataagacaacgggcaacatcattaaattcaacctcgcgtatgaaaaccctaatggcatttatatcaactcgcagtcagattttgatgtggttaattcaaatacgttcaccaaaaatcgacgtaatactgattatgaattaggtgctttcgaatcaggtaacggcctgctatttggtgcggatttcaaaacggcaaaagagggcaagtcttcacgcctggaagtgaaatacaacgtactgacccacaatgagggctaccaggctaaaaacaacccggatctgccaacctttaaacttggcgataactggtttgacagcacggacgatgagaatacttttgtttgtccgatgctccttgccggcatcatgaaaatgggcactatttcggttaaaaacggcttcggtcttcagatgtatgataccaatggtgaagccgtcacagagttcggtacctttgacaccaccgtgaacgtgaacggcaaccaatacacagccaagtttgtaaatggtaaagccatcattgatgccaacctggacccggataaagaatacgaaattgaagtaatcatcggggataaacccgttaaatttacttatcggacctcatcgggtgacaaaaatgacgaatccgacagccagacaagcaccgatggtgacttcggcataaaccatcacgactttattgacgcgatgggcaatgatgcgtcaaaaggcgtggggaactccgaaaatggcaccagcagtgcgcattttgcaaacagcgagcaatctggagcgcacggcactaatgcgtcgggtaactttcaggattcctctgataacggtgatagcgtcctgacgaacgggaatgctaatgcaggagattccagtaagggtgaacagagcgaggagggcaaagcctatgaaattgttccgcaaagcaaaatttcaaaagagatcacggacaccagcggtattatcgtcctgagtattgtttcgattctgggcatgattatctacgggtactggcgtaag

SEQ ID NO: 76691 - DNA, 93 bp, synthetic construct
  source 1..93: mol_type = other DNA
caggacattatttataaagaaatcagcccgattttcgaaaaaatggtgcgcgagtttgttaacgatccaaatagtaacctgggctttgaaatc

SEQ ID NO: 76692 - DNA, 42 bp, synthetic construct
  source 1..42: mol_type = other DNA
ggcgcgtatatgagcgccgatccggtgtacaacggtattatg

SEQ ID NO: 76693 - DNA, 450 bp, synthetic construct
  source 1..450: mol_type = other DNA
tttattgacagctcaatggatagcattaatcggaccatgccgggtgtgagtgattcgatcgtgaacggggataaggagtataacgaagcagttcagttagtcaacgataagagtttcgacgaagccaagactaaagcagtatctgccgagaataactacaacaatagccttattaaactcaacggtatccgcaacaatttttcttcggatattaatgaagtgcaagaagaatatatcggcaccgtgattaaagaattggaactgaaaattaatgcggtcaacaatctgaaagaagcgattgactgctttaaaatcaacagcaactacacaggcacgaattatgcttcaaaagctaacgatctgatgtatgaggcgacggagtaccagcatgaacgtaattccatagtaaaaaacaattccaatctgttcaaacaacagaacttcgttatc

SEQ ID NO: 76694 - DNA, 438 bp, synthetic construct
  source 1..438: mol_type = other DNA
ctgaacaataattttaatagtcacgacagcgagataccaaacaataccgtttcttctcaggaaagcaactctgccaacattcaagattccgataacggcggggacgtcaaaacgcaggtgacctcaagtcaaacaaccaactcgaaatcatgggagccgattggaagttattcagggagcggctcaggttcgaagaccattacggtaccggaaggcaaaatcaaagtggaatttagcgcataccctattaaaaactacgcgacgaattatttaacggtgtccggcagcaatggtgagtctggtggcgtcgattggggtagccatagtgctgttaagactaaaagcgattcctttatctatacctccagctcgtcggaaacattcactatcgactattacgaaaccgtgagttgggaagttcatttctaccgctatcag

SEQ ID NO: 76695 - DNA, 207 bp, synthetic construct
  source 1..207: mol_type = other DNA
gcgagtctgataatcagcgattcgcctgattcctacaaattgattcccatcaaaaacgactcatttgaaccaaactacattaataaagtcccgactattttaccgaaagttgaaaccaacaacacgacgaatatcaccactaataagacgaactataacatgaccaatctgaattatacaaaccagtgggtggagacctatgaaaat

SEQ ID NO: 76696 - DNA, 96 bp, synthetic construct
  source 1..96: mol_type = other DNA
tttgcgtttggatcggatatcaatggcctgatcggtagcccgaccaacttcttcctgcagggtattggcattgatgacttaagtgggtcaattcca

SEQ ID NO: 76697 - DNA, 42 bp, synthetic construct
  source 1..42: mol_type = other DNA
tggggcgggggctggttaatgcagatgggtgcgctggatttt

SEQ ID NO: 76698 - DNA, 54 bp, synthetic construct
  source 1..54: mol_type = other DNA
tttgcggtgccggccgttaatgaagctgccggcctgattgcgggtaacgcaaac

SEQ ID NO: 76699 - DNA, 534 bp, synthetic construct
  source 1..534: mol_type = other DNA
ctgtttaataatacggtaaacatctatctggatggggaaaatgtaagtgttgaaacccagacgtttgaagacatcgattctaacagcctaaacaaagacatctgcagttacacgttgaatgtgatgaacaataccacctccgatgtggagactttaaaaaatggcgtagaaaagctctgttaccaacatggtcttgaagatgcagaaataaacattgattccagcctgggccatgaccagatcccaattatcgtccatgtcgacggcacatcaatgctgccgaccttacagaacggccaaacggttctggtgaataaaactcacgatttcgaggtgggtgatatcgttgtggccgaatcgaaggaatatggtgggattattaaacgcgttgacaaaattgatgagaacaaagttcacctgatatcagacaacaaaaatattagctatgagtatattgatggagcgttgtatcagatcaaaggcatcaccacatgggtcgatatttcggacgtcaacggtgtggtgattgattac

SEQ ID NO: 76700 - DNA, 3864 bp, synthetic construct
  source 1..3864: mol_type = other DNA
agtgatgtaaacgtgacagattcttacacaaccagtgtcgcggacggcgcctcaaacgtctcagttccgattgaaaattcggacgattccagcgtcctttctctatcaagcgaaagcgatgtgggcaatgtctcatctaagaatagcgaatcggtcaaatccaacactctgtccacgaactcggatactaactctttaagtaaccgcggcaatgatgttctggaagtgaataataccgcgtctccgacgatcaatgcctcggagacgattgcttcaaaagacattaccaagtattacaagggcagcacaggttatacggcgaaatttctggatatgcatggtaacccactgaacgggtctgatgtgaaaattactgttaatggtgttacgtacactaaaaaaaccaacagtgtcggtgtggcttctttagcgattaaccttaaacccggcacctacaaaatagtgagcgagaacctcattacagggtataaactgaccaatactattaaagtcttgagcaccattaatgcaaacgacgtgacgaaggtttacacggacggcaagaagttttacgcaacctttttgaaaagtaacggtaaagcgctggctaatgcctatatcaagtttaagattaatggcaaaacctactcgaagaaaactaatagcaagggtgttgcgagtctatccatgacgaaccttaagaaaggtacgtacaaaatggtctcttataacaaggacggcctaacgaaaacgaatactgtgaaagtggtttcgaagactagttcaaagctgaacaccaatgcctataccttccttaaaagcgatagtaaaaacattaaagttacgctgctgaacggcttaggctatgcaccaggtagcggtaagatcatcaagttcaccgtaaatggtaaaacgtatagcgcgaaaaccaacagtaaaggcgtcgcgagcctgaaattaccgtatttaaaagccggtacctataccgtaaaatacaagttttcgggaaacaccttttacacggcctctagtgcatctaataaactctatattcttccgagtaaaactgcgacgttcactgtgaaaagcaccacaacgtttgggaaaggtgctaacacccctttcaaggtggctctgaccagcgggagcgtgcctctggtaaaaaagactatcaccctgaccgtaaacggcaagtcatatgataaaaccacggatagtaacggcatcgtgtccatcccgattgatttacagaacggcaaatataccgtgacctataaattcaatggtgattctaaagtaaatgcgaaaaccggctcgtcttccattatcgttaaggaacggacttccactaaagttacctggaaaagcggaacatctttctatcagggggctcagtcgtataaagtgttattgcaggattcgaacggcaaagcgctggccagcaaagttgttaaactgactgtcaacggtaagacctacagcgcaaccacttcaagcaacggatacgcgacatttaatgtgaatctcgcgccgggaaactacagcatctcactcaaataccctggcgacaactcgtacgcgcccagcaacggaaatgtcaaagtcagtgttgagaaaaaagaaaataccggatatgggtattgggtttatggtgaagacatgagcaatgtggacctgaaatcattagcgtccaaaggcactagcgatctgttcctcaactttaaagccattgagcttcatggccaatcgaaagttgaaagctggattgctagcgcgaacaagctgggcatgcgtgtgcatatttggatgcaaatattctatgaagggggcaaatgggtcaatccggtgaaaaacggcaaaccatatgaggccttctttgagaaaaaaataactgaagcgcagggctatgcaaaaatcaaaggtgtggccggtatccactttgactatctgcgttattccgggaatggggaaagtgcggcgcataaaaccccgggtggtgctgcagccataagtcaattcgttgaggacgctactgaagcgattcacaacatcgattctaacatcatcgtttcagcggccctgatgcctgaaacgaccagtatcttaaaatactatggccaggattactcggtgattagtaaatacctggacgtagttattcccatgatttataaaggaaattatggtaaaacaagcgcgtggattaccacaaccaccaaatggttcgtagataactctaacggtgcccaagtatgggccggcctgcagggatataaatctgatagcaatgttacgaaactgtcggcgtccacaatcaaaaccgatgcacaggcggcactggatggtaaagcgccgggtgtaattatctttcgctggggcgtaacgaactttgtagatttcagtagcctctcggacaaatccacctccccgagtaccacgggctcagtaacgattgcagatataattgcagcagccaataatttgaaaaatgttattaattccaagaataccatcccggcaaccgttagcgtgggcgggtccagttatagcacggctcagtttctgtacatgatgaccgaagctgtgaagaagattaacggtggtaaaacgtcaagccaaatcctgccgatctcggtgggcgtgcccaccaacccatcgggtagctttaaaagcggtaatatcgcatccagcgaatatgtgaatatggcaatcagtattaacagcttcattatggaaaatgggcgcgctccgaatttcgcgtcatcatcgtcccttggcaccattgattatgattcgctggtggaaatgtttgctgatattctgacagactacaaagataataataaattgccaacttctgtaaaagtggacaatggtaccaaatccgaagtcatcacggccaaaacaatctccatcaaggatatcgtgacgggggcgactaacttgaaaaaatattataatgattataagaagttgccgtccactgttacggccggtaaaattacattcaaattatcggaatttgtgtacttgatgagtaaagctattaaccaaatcggcaaatctaatacaaaggccattacgataatcaccggtataggtaacccgaccaatccgtcgggagataacattaacagcaaatatctgagcaaatcagagtatctgaaagtggccctgaacgtgaccaactatatcaataaaaataaagtcgcgcctaattacgtttcatccagtctggggaaaatcatctactcggaatacgtcgatgcattttcccgtatcctggcattttacggcaacgagaatcgtctgccaaacacagtcaccattagctattcctcaggatcaggcagcaattctggaacgggtgcaaccggcacggggctcaatgaagccctgaaaaatgggacggagctgagccagtatcttaaagcgaccaaaaattgtcaggtcgacaactctaagattaaagacattgttaacaaagtgacgaaaggtctgacatctgttaaagataaagcgacggccatttacaattatgtcagagacaacttggattacagcttctactacaacacaaaatacggcgcggtgggcgcgctgaacgccaaaaaaggaaactgcgtcgaccattcacacttgttagtcgccatgtttcgcaccgccgatattcatgcccgatatgtgcacggcaagtgcacattttccagtggcagcacctatggccacgtatgggtgcaggtgctcgttgataagaaatggacagtggctgacgcaaccagttcacgcaactctctgggcaaagtagcaaattggaacacgaacaaattttcatttaataactactactcggaacttgggttc

SEQ ID NO: 76701 - DNA, 1911 bp, synthetic construct
  source 1..1911: mol_type = other DNA
tccaacacggtcgataccaacctgacccatgacgccagtagtgatgcgaacatcggtattaatgatattgaatcttactcttctggtgttttttctgacgacgtgaaaagcaccgggaatgttattgttaatcagcgcaattataagatgtacttcgatgatagcaacgtgctgaaaaaggagtatggcggcaaaatcatcgcgttttcgggtaagttcacggataaaggtgtgattacgatcgactccgaaaatacgaaaatcaccgggcgaaataccctgtttaacaatacggtttttaacatcaaatctaacggtgtgatgttgactaatttaaattttgttctgaacaaggaatttagtgataacgagggtgcttgcgtactgattaatggtgacaacgtcaccgtctataatgtggatattgactataacgtgccgaaaaatgttaccggatttggcatctattcgaacggtttggatgaaagcttatctgatgttaaactggtcaacaacaccgtgcggcttcatggcaatgcgttaaatgatgggtacaattatggggtggtactgacgaatacccgtgacgcgattgtgtacggtaatattattgattgtcagctgccgctgcgtgcggtgaactggatggccgaaatatatggcggtataagtatggatgcagtatccgggctggccgcgggctcatgcaacggcttaagactgtccaataactacatccgctgtgtggtcaatggtgtggcccagggcgaacctaccttggatgcggtactgatctacgcatgccacaactcgacaatagaaaacaatacaattattgaaaacgattacgttaccaaaaagggtgacgtgaattacctctatggcctcgatctatatttgtctaatgatgttgtaatctatggtaacgacattcacatccgcacaagcggcggtaaagaggcgcacggtactgcttatccgattcaagtaactggccaggcagaaaatatcctgattgcattcaacaatctgagcagttacagtaacggcccgaacatagggatttattcacaaaactattatggagtaactcatctggacatcattagcaactttatcaacgttacaggccatgccagcaaacacagttgggctctagtggctggcattgaagtgcaggattccgatgaccggatcatgaacaataccattatcgttgatacagtgaataaattcgagaaaggatacaacgtgtacggcatcagctatagccaacgcaccgatggagatcacaactataacattcagtataataacgtctcaaccaattcggaccatgcggtcgccctgaaaggcagtggcagctccacggtcagcaactcgattgttgccaataatatcttaaagggccgcaaatatgggggaaaccgtgcagcatacattacgggaggcaccggcaacgtgatcattaacaatacggatgggtcccgtccagtccataaaatgaccgacgatgagtattcggataaccttaaattctacctttcaagtccattcaaaggcaacggtctgggcctgggctggcttgacggtgatggaaactccataatcggcaacggtgaccgcaacggcaatagcctgaataacgggaatagcggtttggtcaacaataaggtttacggtaacaatcttaattacagtgaatcgcaggcacgtaatggcgtcctcaattcaacatattacacttatggttcgtcaggtacggacattgccagcgcttcgtcatcttcggggagcggggcgggaagcagcaactcagagtcatctgatgtgaaatcctatgaagtaactaaaaaaattaatgataacctgattcatattcccattgtgatcatggcggttatcgccctc

SEQ ID NO: 76702 - DNA, 3225 bp, synthetic construct
  source 1..3225: mol_type = other DNA
accgaagatgtcaacgatacagccattgctgattcagaaattgatgaagtcagtgcggtggatattgaacagtctgtggacgataacgagatcaccgaaattcagagcagcgacgaatcaaataaggtgcttgcacgcggcacgccgacgactgcgaaggattggaatacattacgaaccaaatgtgaaaaaaccactgaccaatatatcacattgacgggtacgagctatcccatcggcacctacatcacctttaaaaatagtgcgacaattgtggggagcgatgttagttacatcactggcggttctacgtcaaataccccttttgtcaataataattcggcgttaaccctacattttatcaacgtgaagtttttaaatgtgaacgccaagaacctgctcgagcttgatggtacggtttatctggacaattgtacgtttgataacgtgcagactgccaccggccacaactcggtaatttataacacgaacaatttgatgtacttgacgggctgtaacattacgaattgccatacgggttatggggcggttagtaattacaactcgggaagcaccacaagtccggtaatgtatgtggatgattgccggtttattaataacagcgcgagcgtcgagccgggtgcgattaataattgcgggattttgtacgtaaataactcggagtttgatggtaaccatgcaaactggtgggctggcgccattcatactcatacaaatgctcagaccgaaattgaaaataccaactttcgcagaaacaccgcgggctggaatggtggtgccttattcacctacagcaaactgaaaatcaaaaattgtacgtttgaagacaacaactgtaccactaacaacggtgggggcgcaatcggcgcctacaactatggctcaggctacaacataacaatcgattcaagccgctttaattataatacaaacctttgctatgcatacaccaacattagcactacgtccgttgggcgtggaggcgcaatctctgtactgaatggcgggtatttaactgtgtataacagcaatttcacgggaaactatgcgaaaataggtcaggcaattgccgcggccacctataattatgaaaatggcacgggtggcaacccacacatcaaaatttgcaacaacaaatttaccgaccacactgccacgggaatcgacaccgtagttattaccggcaatgattatatattcaacaacaatgtctttatcaattcgtatcaaaacaccatttacaccggcactggcaacacatacaactctgccgcgctgccggggaatctgaatagtaaattgaatctgaaaaccaaactgcgtgcaacgaatacggaaatcctgtcggattatcaggatcatgacgtggtgtacgtgaacgtgtcgtcagacaaggatgcagaagatgacaatgtgcacgggcagtcctgggatgatgcttacggtggtctggagtgttttgtcatggcaatcaactaccttcacaataacgggataatttatattgcagatgggcgttataacgaggactatggctatgaatactcaatagcgcacggaaactttactatgattggtcaagggccgaaaactaacatcgagaagattataaccactgtatatggaggtagtgatcaaaattctacccataacttcatcaatctctctttcacgggtaaagattttgggatcaacgcgaatttcatcaattgtacctttctgggcagcatttcaatttcaaaaggtctcacatatcatgatcctaatcatgttgtggaatatggctatgctcagacctatttcatgaactttaacaactgcgttttcaaggatgtcaataccacgaacgcgttagttacgctctataagtacggtgcggtgaactttacgaattgcattttcgaaaatatcacggctgattccattgtctatcgtaatgacattaattattttgaagaggatggcattagctttaaaaactgcaccttcactaactgtaaatataatggtattgccgattccctggcgaattttgatgatgctgtggttattgaggattgcacctatgacagcgaagttgctctgggcaccacggaagttaatggccattactatataaatgctacgaagcttaaagttacggctgtgggcaccagtatcagcatcaaatctaatgaaaacaatgtaattgttaatctgacggatgtgaacggtaaccccgttgcgaatgccggtatcatttatagtattgccggcaccaacgccagtgcaacgacgggcgcggacggtactttcaccctttcgaatctgaaaggtattgtaaacatcacggtgtactattccggcaatgaatcgtacctggcgtccaacaaatcggacaatttcatatttaaatacaacacggctgtttccagtgcggtgaacggtgatgacattctaatcatcctgaaagacgacgagaacaatccaatcgcaaacgcgaatgtaatctacacagtcaacggcatcgactacaatgcaaccactgatgaaaacggaaccgtcactgtgtccaatctgaaaggtaaatttgccttcaacgtactctataaaggcgacaccctccacaccgcttccaacgcgtcaaacaccttcatcttcaaatatgggacaaaaattacagcaaaaaaagtaacagccacgtacaatgttgcgaaaaacttagttatcaccctgaaagatgagaacggaattgccattgcagggaaaaaagtcaccgttaaagtcggatctatccgcaagactctgaccaccaacgcgaaaggtcaggctactctgaaagtcagcaacctgttgccgaaaacatactctgcaaccgtcacttatgcgggtgacgatacccacattaaatcctccgtgaaagttaaggtggttgtgaaaaaggcaacactgaaagtatcggccaaggcgaaaaaattcaaaaaaagcctgaaaaccaagaaatattctattgtgttgaagaataatgtgggcaaagtcctgaaaaagacgaaagtgacactgaaaatcaaaggcaaaaccttcaaagcctacaccaacagcaaaggcattgccacatttaaaattaccaagctgactaagaaaggtaaatacaatgcgtacattaagttcgccggaagcaaatactacaacagcttaaacaaaaaagtcaaaatcaccctgaag

SEQ ID NO: 76703 - DNA, 1041 bp, synthetic construct
  source 1..1041: mol_type = other DNA
tcgacggtgaactatccacgcagccataaaaccattgaaatcacgcaggacaactacgaaaattatttcaacattcgtacaggcaagattattgatgcctcatgcatttctaagggcgatactttaaaaatcggcaatatcagcaaccgcgcttttgtcatcgatcgtcagcttatcctgatgccgatctcttctaatgataagattagtaacggctttatccacctgattaaaggaagcgatggttcgactgtaacgaaccttaccattaataacaccaaagatcgattgaacattctgggcggaaacgttggccaactacatgggatctggttatccaattcgaataataatctgatttcatacaacaccatacgcatcgcaaatgccgcgggcgtgtacgccatgcccatgggttggtccagcaataatcggattatttacaacaacatgaaaacctacatcacctgtaatatggttatgggacagtgtcattataacctgatttcacataacagtctggagttgctgagttattccgacacatcagtcaccaacttgatctatttcaacccgttcgggcacgccgattatagtggtagcggattatgcaaatacaacatgatttccttcaatgacttcaaaggtttttctaacgggcctatgtccattctgctgcagagtgtgtatgaaaatcatgatggcactgttattgcgaataacacgtttagcaaaggctcatacgcgattcatctcttcggcaacaacatttcggtttacggtaatgtcgtactcaatagtgggatcggtattagcgtttttggccgtaatttttctgtgcacaacaatgcggtaatcggtgacagccaaggttatggtattatggcagaagcgaacggcggctcgctgtgcaacgtgtataacaacaatatcacgtttatagacgtgtataatgcaatatttattggtaatcacgtcaaagcttataataactacatcaatatcaaagagtatggggtgagcatatttatcaaaggtaac

SEQ ID NO: 76704 - DNA, 144 bp, synthetic construct
  source 1..144: mol_type = other DNA
aacattcacgacaatcggatcaataacaaacatgatgccggtatcagcgtgctggggaataataacaccatcaataacaacattattaacaccaaaaatataggcattacgttaccggcgcgcagtactaactgccgttactat

SEQ ID NO: 76705 - DNA, 1182 bp, synthetic construct
  source 1..1182: mol_type = other DNA
aacacatttaccaacaacaaaattaatagtgaaagctatggtatctatattgatggcctcgtgtacaattgcataatattggataatattatcgagactaacagtacgatgggcatttttaaagacatcacggatgagctgtccaacattgaagaaaataacatggtgaatggtgtgattctggattcaacctatattatcgtcaataatactaactatcataaatatttcgataaatatgggcacttaacatttaaattcgaaaaaaacaaaacgaaaataatctttctgacctttttaaccaataaaaacctgattttccaggagaagataaacgtcatcagcaacaaaatgaacaacctgctgattaatgtgaccatcacgttcgaaaccaatgccagtggtagcttaatccgtgattttaattttattaatcacgacaaagaggccattattctaaatggggttaatgacgttaccgtcactcggaacaatattaccaatctgttccgcaacggcagtctgagcaattccgcggtgttgatccaggatgtgtgcgaaaacctgatcatctcctacaacaacatatatgtaaatagccgcacccactgttacacttatgcaatcaatgcgccgtcaattaacccagctacgcataaaatgaacaacaaattgagcaagcgtgttaatatcctggataataccataatcatgatctcttccggcattacagaggcgatttacacggatacgttgtcggaaagtaacttcatttcgaataaaattaacattatttcgaagaactacggatatggtatcgcagtttcgaacatgatcggacgtctgtcggatattaacgtttcaaacaacgaaattgtgatccatagtgagcaaatggcgtacttaatcgaacttctccaggtggataatagcaccattgaaaacaacaagctctatggcaaaagcaatggcgtctacgctattggtatttattggtctgacaacatctcggttaataataacgccatttctgtatttgggggcaatctgagcaagattctggaaatctctgacgtactgggtatcggcaactcagcgatcgcaatccttcgcaatagctctaaaattattatttccgaaaatattatttacgccaatctttcaaaaacaatctttgacaac

SEQ ID NO: 76706 - DNA, 2775 bp, synthetic construct
  source 1..2775: mol_type = other DNA
actgacgggattataaatgcatcttttaattccttcatcattgataatgagaactataactgttatttcaatgaggtgggagaactgtatagcaacgtggtaatcaaaaacagtactttgctgatccacaatctgaccaaaaatcaactgttgattatcaacgatctcgtgaaaatcagcagctacgatttaaactcacccagctcaatttcaataatctttaaaaacaacgcctcaaatagcattatttccaatgcatcgtttattaactcgtcaattgatttaatcaatgtgagcaacattaacattatcaataacacgttcaactcttccaatagttgtatcctgaacattaatggtggcgaaaaaaacctgtttgtgaacaacgagctctttattaactcgaccgatatctccgtgattaatctcaacaaaactctgttaaatattatcaaaaataataacatcaaattcaataccagcaattctaagatcatcaccattaacaattcgaatttcaccctgattagtaataacgtaatcatcggcatatccgattccttgatttttatttgcagcaagggttccagttacgataacatttataaaaatatcctgaacgcgaatgcgtcgtccatatgcggatacctggcgtcgaacgcaaagtggagtagtattagttataacaatatcctgatcaacaaatcaaccaatcagtccgcgatctattactgtaacaacagctctaacaatacaattaatgaaaactatatcattagctatagcctaaacgccaacgactatgcagtgagcgtcatctcaaatgaaagtctgtcaaacctgatcattaaaaactatctgataagttctaatggattcaaacgagccaattttgccgtctacgctccgtttgatcttgtgaaagataattctccgtttgacatttatgtgagctgcaacggaagtgatgttgtaggcgatggcagtatcgacaatccttatgccacaatcaaaaaagctatcgaaaacagtctgaatttgtatgtgatccatgtctttgatggcaattacacggagtcgaacattattattgacaagaatctgacacttgtggccgtgaacttagggaaagtgttcattgatgttcagattaaccagctgtttgacattcttgaagacaatactctgagcatttcgggctttcttattggaaatgcgcataatgttgacggcggatcagtattcattaacaatggtaagttgttcatcaacaatgtagttatattcaattccagctcgtattttgacaattctcatccgatattcgaccaaaacataacgtatcatgaagataacctgattgataaagcacataccgtggattgctctaacaccgggaaaggcggcgcaatcctcaacaacggggaactgattattaacagcagcatctttttcaataacttcgggcatcgtggtggtgtaatcgcggattatggcaaaactattatcaattcatcgattttttataacaatcgcggaatccatggcggatgcatttatagcgattcaaaaaacaacttgtttgtcattaacagcatttttaacaataacaccgcagtaacgtcaatcgacttctgcaaaatcatgctgcattccattggttggtccattggcgagaattacatttacaattacaaaagcgaatgtgatagcccaattggggcgggtggcgtgatttatacgaaaaacacgagcgtcctgattaaaaattcatcgttcatttataattctgctcgtattggtggtgtcatagccacccagtgcgatatttttacacagctaagcaacttcattagcgacgttaacctgtatatcgataactgttactttaatagtaacaaggcgaatgatacgagatttaaagatgatccgctttatttaaagaactatgattactttaacgactataacggcggcgttgtttacggcacatacaataaactctacatcaatgcgtctaacttttattacaaccaggttattaataacggcggcgttttatatgctaaagcgaacgatggtaagatcatcgactctattttcaataataaccgtgccggcagtaatgggggtgctctggatatcagcaaaaatttccttatcatgcgctcaattatttctaacaactccgcgcggtacggtggcgcgattgaatatgattcgtacacctactatgggcatattcaggacaactttaacatttataattccaccatctctaacaataaagctttaaacgcaggtggtgcctttaacatcggttcgggcaacgtttcggttcacgactccaacatcgtcaacaacttcgcaccgagcggtactaccataaattctcacggaatcaaatacgcgattgacatgcgctataactattggggtgtgctgcccaatggtcatatcggcccggatgactcagtttggaatgtgaaccacaatctgtttaaaccgtggtacaagcaatgggtcgaatggaagccaaaagtcatcgaaagcaataattcggggtttaacagcaacagcagtaatcacaacccttacatcaatcctaactccaactctggtggcaacaatcacaataatccaatatcgaccggctctagttcgtccacgacgacgtcaattggtggcgccaacgggaataatcacggctacggtaatgggaaatactttggtagcggtgatgggaataatttgggtccgagtagtggcaatggc

SEQ ID NO: 76707 - DNA, 291 bp, synthetic construct
  source 1..291: mol_type = other DNA
gccatcccgggctataataaatataatgggcagaacgtgaacagcaacacctcaagcaactcccataagtcgcaaaatcgcggcaatgtggatagtgatagcttaagcaaaagcaatagttcaaaatataatccggacctggtatcggcgggttttactgttaacgctgcgtcctctccatccagctcgcagcggggaatcgaacgtgccagtaaggaatcaggttctctgagtgactccgcatcttacgagattacgaaaaaaattaaagaagtcttctacgatgagaac

SEQ ID NO: 76708 - DNA, 6501 bp, synthetic construct
  source 1..6501: mol_type = other DNA
gatactaacacgagcattgtcgaagaaccaatggatgttaaacataatttatgcgatattaataatagcctggaaaaccaagaaatttatgtcagtccactgggtgacgatgatgcgaatggaagttttcaaaatccggtttcctccatccaccacgctgtagcaatggcaaaaaataattctaaagtcatcctgatggagggggaatataaaggtgcaaataacaccttcatcttaattaacaagaatttaaccattgaaagcttttcaaacaatgtggttattaatggcgagaataaacatgcattttttaaaatcaccccctctagcagcctcatccttaataatattaaattcatcaatggctacacagatagctactcgcaattaggtatcattaataatcttggaaccctggtgatcaacaactcgagctttaacaatatgaactcgattatgggcaccttcttcaacgaaggtacgctgaagatcgaaaataccaaggtaacgaacgccgtgtcgctcaccatggcgcagatcctgacgaacatcgggaatactacgatactgaactcccagctgattgaaaacaatgaatactcttcaattgatgtggtcgtttacaactacaatcgcattagtattgtgaactcgcaagttaataacctgttcagcaacaagaaatatagcgaggacagctacaatttagcttcaattctgattaacaattcgaagctggataacatcgatcttgaagatgcctttgtgtgcattcacaactctcagatcacctttaagagcatttttaacggttgtaacgtttcggttgacgagagtacctttctgtataacaagtcgctgtttagcatcattaatgtaatgaacagcaattttacagcgattcattccgtttttaattcgcctatttcaacgaagcgttcgcacgttaacatcacctattctgcaattttacgctccatatcgggaaacgcctacaaatgttatctttatgctccgtataactggtggggtattaatagcggtccgtcttatcagtactttaccgatgtcaacgtgagttattgggcaatctctactttcgagtatgaatctgactacattccgattaatcccaattccactttcaccaccacactgaataaatggagcgatgggaacagtaccttcgagttcaagaccgaagaatatctgccgtttcgccatttgaaatttgaatctcagaacggtaaatttctgtattcctcggccaacatcgaaaaagtcttctcaaattatctgattggaaacaaccttgattgtcaagtgcacgtgattatcgactttcaacgcttgacgcttcgcattggcgaaggtctcactaactataactacttcgtctcaacagaagggcatgacgggctgggcaatggtactttcgaacatccatttaagaccatcaactacgctgtttccaaagtcggcaacggaaacacgatttgtttactggaggggatctataaaggcaactggaatagtaacgtcacaattacgaagaacataaccatcgtgggcctgggaaatgtaaacctgctccgttctaacgactatagtatcttcaacattaaggaatggggcagtctgagcctgaagaacattaatttctctgtggatatcattgattacgcccaccccctgattattctgaacggtgggaacctgtctattatcaattgctcgttttccaacatcacgtcgacaaacgtgatccacacctcgaacgggatcgaacacaatggcattgtcaacatatcggatagctattttgccgacatctcaggctcaatcttaatcgggagcgcgaaagtaagtgtgagcaatagcctgtttgagaaaattaagtgctataggataatccagggctatgaatattacaatgtactattcgcaattagcagctccatcgagatctatagttcctgctttcaaaataatttaatggggattgtaaacctgcatccatttttttactcaagctccaaactgcgctattctcagtatagcaacgcatattcaagatacgcttatatcaaaaacaccaagttcgaaaataacgtatttttcgataagaatagttattacagcagtaacggcattggcctcgatatttataacgaaaatgaacatttttatggcatcatcgacaactgctccttcattaacaataaaggtcagctggccatcgccaccagtgtcaattcatccatcttcatgaacaatttcgaatcccgttatggttacagtatggtttatgctgacctgattaataactcagtgttcattaacaacaaaaatctgtatgaagactataataatgtatttatcggtaacggcatcgcgagtgctggctgtatcttggagtctatctttatgtataatgaagcggcgttcggtggcgcgattgccgacacaaaagaagcccattactgtgtgtttgtaaataacacttcgaaatatggtggtaacgatatttattcgtattcaggagatgtcgattattcgagcaactggtggggtgataatcagaagccgaactctgataaagtttttatcttcctgggaacgctcactttgaacaattgggtcatcatgacatttgagtcggtgtcaaatagcattattaaagcttcactcaatgcgcttaacaacggggaaggtaacatttgcaaaattaaccacaacatgccgtctcgcatggtgtatttcaagattaatcatggcagccttagcccggagaatacgctgcttatcaataattctgcgtacaccaacatgacgtataacctgaacctggacttcaaagtctatgcacggattgacaaccagctattagagctggatattcgtaacaccaaaacgctcttaatcatggaggatgttattttcaaaggtaaaagtaacaattttgcggtggatctgatcaatattaatggttataaaatcttcaaccagaccttagtggtggaaattattgatgagaataatacgcagaacatctttaccattcagactgacgataatggtcatgcagaatttaacgtcgattacccagttggtatctaccaggtaaacattaattacctgggtaacggctattttgataaatgcaactcgacgtcgataatgaaaatcataaaatcgaatacttatctgattagctataatcaaacctactacggcaagaacaacttgtttaaatccgtactgtttggtgaagggaataagaaattaagcaacatgactatcaaattcacgattatagattctaaaggtaatctgcgcgaaatctactcgttaactaatcaggacgccacgagtgaaattattatcaatttggatgtaggtgagtatacaatacgcagtgaatttttgggtgatctgtggtattcgtattccagcagcatttctcatatcttggtcaacccggtgagttccaccctaattgtgtctaatgttaccctgtacggtgtgggggatgtttataacattaccctgaaagacattcacggctcattgatccgtggtgaaaatattattgtcaccatcactcagggcgccagctgcgataaatttacattaaaaacagataataatggtgttgccaaactgactataaactatctgcctggcgtgtataacgtgaaagcgcagtttctgggagatagtatctatgccccgacgagcggtgagggcgtgattaaagtggaaaaaattttcacgataatcagcgggttccatcattgtattctgcccctgaacgggatctacaccgtggtgctgagtgatatgtacgggcgacgtgtcaacaacgaatctgtaaccctgtccctgtacaaaggcaacctaatcaagaaatacaccatcaacacggatgcgaatggcgaagctgatttcgttattaaccttgaagaaggcacctacctcacaacgtttgaatacggtggcaataaatggtattgtgacgccacgaacgcggcaacgattgttattagtaaaaaagtgaacctgtccaacattaacatcaattcaaccgacttggtgcagtattacggggaaaataaatacttcatcataaaattcaatgaccctaatgcatacagccagtatggcaaaaaaattggagttaccataagctctggctcatggagccaatcttatgaggtgttcacggatatttttggtcttgcacgtctgaaaatcaatctgaatccgggcgaatataacattacttacaaatacagcaatagtcattacaatatatttggcacaagcagcaataccatccatgtgtataaaatgccggcggtgttaatcgcgaataacattgtgatgaaaagtaatgaacagcaactgtacgagataaacctccgcgatattaataataatcctatcaaaaacatgcttgtcaatatcgatattgatggtgtgaaatacaattccactacaaatgatgagggtatcgcgaagatcctgctgagcttgggtgtgggcaagcacattattagttataactttatcaatccgaattacttgtcctccaactcatccagcgtcattctcgttgttgacagtgataaaatcccgtccaatctgtacagccaggatatcaacgcattcgacaatcagatcctgaatttcaccatccgattgtcagacatgctgaataatagcatcagcagttctgaggtaatactggagctttttaccttctacggcgagtccattattaacattacgggcatcaccgactccaacggacgtattagcttcgatctcaatctggactacggaaaatacatagctaatctgcattataacggcaacgcgttgtacctggcgagctactcaactaacacgattaacattgaatcagcggataatcgtacaaaaaccattctgtttaacgtagagaccaaattaaccaactcgaaatactacgtcattttgtccgacatcaacggcacgttgcttgttaacaaggaaattaagtttatcatcggaaataaaacaattacgtccataaccgatgaaaagggccgggcttacttggagctgaacctaaaccctaactattatattatcaaagcgatctttaatggggataaggactacaaatcagtttcgagtttgaaaaagatcttcatcagcggtgaactcacgcatctgtatgcgatcccactggtcaaatattatagaaacggcacgcagtttcacgcccgcctggtgaacagcaaaggcgttcctctgattaacaaaatactgtctattctgttggaagggaattactataattgcaccactgatgaaaacggctggatcacactgaacattgacctgaaaccaggcttttatgatgtggaatgctactattatagcaataatactgacgaaaattcgtttgataagaccaatatcaccgtactgtctaccgtcttagggcagagtgaagtgaagtattatggcgactatccgtatctgaccatcaaatttctggatggcgcgggaaatctcatcaaaaacacaagttttgtgattgacattgatggtaagaaatactctgcccaaacgaacgacgagggtatttttaactttaaccttaacttaaattcaggcagtcaccttatttcagttaacaatccttatgacgggctgtttgtgacgtataaactggacattctgacaacgatttgctccaataatctcgttaaagttttcaacaatggagtgagctacactgcgcaactgctggatagctttggcaacccgctcaaaaataaaaacgtaaaaatcattattaatggtgtcttatattataaaaaaaccgatgtgaagggtatcttagaactgaacatggactttaacccgaaaatttatcttgtgaccgttttcaatccggttactaaagaatatattgagaacaccgttaaaatcttgcccacacttattaataacaagaatatcaacatgtatttctcgaactgtgcgttttacaaagttcgtgccattggcagtgatggtaaaattgttgaatcgggggtaatcgtgaaaattaaagtcaatggcaaatcttacaaaattaaaaccaacaaggatggttacgctttgtttaaaataaacctcaagccgggaaaatacataattaccgcagagtacaattcatacattgtatcaaataaaattaacgtaaaatccctactaaccgccaaaaacattttccataaaaaagcgaaaaagattaaattttcatcgaaattggtggacattaagggcaaagcattaaaaggtaaaaaaataacgtttaaattcaaaggcaaagtctataaagtcaaaacgaacaaaaatggcatcgccacccttacgattaagaacttaaaagtgggcaaatatactataatgagcatctggaataaattccggatcaaaaacactattaaaattaaaaaa

SEQ ID NO: 76709 - DNA, 5631 bp, synthetic construct
  source 1..5631: mol_type = other DNA
acggaggagtatctttcgtcggaaaattatgaggagatactgagcgcggactctttcaacgacaacaacatccttgcgtccgcgagctataataagaccatttacgtaaattacacgggcgacgactcaggctcaggcagccaaaacagcccgtatgctacactgaacaaagccatctcgaatgtaaatgattctgataacgcggttgtctatctgagcgcggggcgctttagcggtgagaacaacacggacttaagtattaatctggctcatcgcaactataacagtagtttgactatcattggagcaggtaatggtcagactatcctcgatggcaacgatgaatcagccattttcacatcaattagtgcggatagcattgtcacgctcatcaatattacgttcacacatggcaaatctgaaattggttcagttatgacgacgtctgggaatctgaccatcgacaattgcatttttgataacaattatgcgacgagctctgcggcaatttacgcagagaacaccgaggatataaaaattaccaattccgtatttaagaataactacggacacgaaggctgtgccgacttttattgcgagggcagtgaatcaacaatcatcgatattatcaattcgacctttataaattccacaaccccatatctgtatagcctgccctcgtttctgatccagtactccaatgccaacattattgggaacaaatttgaaaatataactggcgtctatcactcgggaaccttcgagctgaaatatggctatggtaaacgtaaggtcattaataacacctttattaattgcaactatactgggaataacgatggcggcatcatttatatttccaacacctaccttaaaaacaaccagtttatcaactgtacgtcaaaaaaagcgctgatctactcgctgactgagtttaatgcatatctcaaatttaagaatgcgaccattaatggcacggaatttaaactgtattgtgaagtcaccgatgacttgaacaacagtgtcagcacttatggcgaagttcacttcttcattaatgacgaaaaaataaagtccagccggtccaacaatgggacggcttccatctctgtgattaaattgttagataatggtgattacacgcttagcggcacgtattactactatgagaatccgtttgaagttaatgtgaaaaatgcaaccctccatgttgattttaatcatgaccccctcgaactgtgggtctcaaatgatggtaatgataccactggtaatggcagcgaaaacaatccgttcaaaaccctgaaacacgcgctgaactatggcttcgagaacacaatagatctgacgattcacatgaaagatggcgtgtacacgggcagtgacaataaagatctgtcttactcgaacgtggggaaactcacgattttcggtgaatcttatcgcaataccatcattgacgccgagaacaccaagaagatttttaatttcggtgaatatctaaatgtgacgttagcaaacctgaccctaagaaataccagcggaaatgtcatttcggcgtatattctaaaaatctacgattctgtgattgagcacgctgattctctgaacggagaatatagcgatacctcgaaaatcatttttaacaacctcacttacactaacagcggtggcatatacatctacaatgcagaaatttacaactccaaattcaaaaattgtaacaatactaaaaataattgcctgttgcggatcggttcgcttggcaataatatcatccatattgagaacactactatcatcaacaataccgttaacggtcgacacggttcttctattgtgagcatctcgggcaatagtgtgttgatcaataacgattacatcaacaatacggttatttcagaaaactcgaagtatatttttcagagttattcgaataaactgatctcggtcaacgaaactttcatcggaaacaatgtgtccagttatatcgcctattatgatattaacggcaataacgtggaaatcattattgaaaatatcacttttaaaaataactatgtcaagaccgatgggtcagggttggctattaagaccggccggattaagggtgccaaatttattaacaatacggcgctgaacaacggcggggctattattatcctgcctcattacaccggcagtcaggtgccgaaatgcattctggaaaacgtattctttgaaaataatagtgcaaataacgggaaagacatctttattgaaaaggccaacatcggttacgaaaacggccagctggacaacattaccgtaacgttcaatagcctgattacacataatttgcaagatattgtgattgcaaatattagccacgtgagcggagcggttattggtggtggcatgattgaatttgatctgaacggctcatatatgggcgttgccgaggtgattaatggtgtggctaaattaaactatttaggcttcaccaaaaacggcaattatactttaagtggttcatataactatgaatcaaacaccaccatttataacagtgcggtggttaatgtaattcttaacccgttaaaagaaaatattacgtcatatgtgtctgatagccgaggggatgacgaaaacggcaatggttcatacgaaaatccgtacaaaaccattgaaaatgccttgaacgaaggttataaacagtctaaagtaatttttatcaaagtcttggaagggaactataccggtaaattcaataacaacattacaatttatgattcgttgaacatcaccattattggtgaaggaattgataaaaccatcatcacaggcaataatacgaaaaacaactggtttatcaccgtcctgcatgcaggtaatgggtttcttaaattaatcaatatgaccattagtgaaattaactataactacaaaaacatgaacagtcagaaaagcgcggtggtgattgaaaagggtgcaaacgtattcatcgattctgttaaatttactaaaaatcgtggctacaacggcggggcaatcaacaatcaaggtacgctgaacattattaactcgattttctataacaacggtgattcaagctatggtggaagcatctacaacaaaggtataaccatcattgacaattcatcattcattgccaatcatgctaaatactgctcggatatgtttaatgagggtattttaaacatttacaactccaatattcaggattctatgcgtaccaacggttggacaggcaacacccttgtgattggcggccttggcaacataagcattattaactccaaaatcttcaggacaggtaaaatgccgttagaactcattgatccagacgatacatatgcggataaccccgccttcactataagtattgggaccattgggagcataaccttaatcaataccacaatcgacggtcatgacgccaaatatacgggcccgaacttttatattacaaacaatgcggcgatcagctggagcgtctctaccaatattaaaattcacaattccagtttcctgaatctgaacaacatcctaaacaatcagatgggcaatttaataataaagtcatcctttattaaaaatgtctccaacctgattatgtcaacaagcaattataatctcacggtaataaactcgtacttcgccgatggcacgatatccacggaaaaatacgatatctccaatatctacctgaacaacaattggtgggggagcaactctaagccgacttataaagtagataatgtggacaccactccggagacctggctgatcctaaccctgaaccaaagtaacaaagagagtctgttgaaagacattattttgtcgtttaaagttactgatggtgagaacatcacggattatacggggtacctgtaccctcgtccgtttaccatgtcggcgatcaacgctaccctggaatatgccaatggcaacatcattaatcatcttatcaatcaaatcaacatggcgaaaaatgcgacgagctattatatcgaagctaaaatcgataaccagaccgtgaatttaacaagtaatatcacccataacgttactatcattgctaacgatatcgagtttgattacggaacgaaaacaattactgtgaatgttctgttcgacaacctgtctgcagacgacgaaattattactctgaaagttaacaataaagagtatagcactaagatcaacaatggtatcgctatctttaatattgacaccctggttcgtgggacctacaccctgaactacagcataaacgcgacggaattacacgacaatgtaataaattcatccacactcattgtcaacggcatagatccaaatattaatgcgagttcgaaagcagtgctggtgggaaataacgtgaccgtcaccataaccatcccttcggacctgacaggcaccataaatgttatcttaaataacaaaacctatgtggcagagatccatgacaataaagcgattgcaatcattcctaatttagcccaaggaaactacctggccaatgttatctattctggggacgaaaaatacctggcgaaaaacaccacgttgaacattaaggtacttgaaattaatatttccgccccgaatgttgaaaagtactacaaaggttccgaaaaactccgtgtgatcgtcatcgatagtgaaggcaacgcgattgttggtcagagcgttcagattaaacttaataatgtaaattacacggaaatcaccaaccaggaagggatcgtcagcgtcaacctggacctgaacgtgggcaaatacagcgccacgatcctggtgaacgataaaaaaattaacaccgaaatcacgatcaaatccacaatccaaggatttaacatgatccgtggctataatagcggcttggattatcaggccactctgttgaacgatgatggcacgccactggacaataccctggtaaagctcaaaatcggcaatagcatctatgaagtgcgcagcaacgccaacggcgtggttaaactgaacaaaaagctggcaattggaacctacacggtcctgattacgaatccttctaactttgaaacgcaaacagctactctgaagattgtgagccgtatcaacaataataagaacatcattggtgattacctgagcggatttagctataaagttcgcatcattggtgataatggtaaatccgtgggggcgcgcgagattgttaaattcaagattaacaaaaaaacgtacaacatcaagaccgataaaaacggttatgccagtttgaaaatcacactgactccaaagacctaccaaattacggcgacatacaaaggtcagagtgttaagaacaagatcaccgtgaagcagatacttaaaaccgcgaaaaaaattaatatccgcaaatctgcaaaaaaactgacgctgaaagccacgctgaaaaaatccaacaaaaagccgcttaaaaacaaaaaaatcacgttcaaatttaaaggtaagacctacaccactaaaacaaacaacaagggcatcgctaaaattatcattaagaagaacgttattaaaaaactcaaggcaggtaaaaaatataccgtaaaagtgacctatgtcaaagacataatcacaggatcagtaaaagtgaaacgc

SEQ ID NO: 76710 - DNA, 4974 bp, synthetic construct
  source 1..4974: mol_type = other DNA
atcaatgaaagtgaagttgtgggcaacgcagaaatcgaaaacaaccttagcagtacgaacgataacttcgaagttagcaaggatatcgggtacaacgtctcaaaaaagatttccacggacaattcaaacgaaaacttacgcaactctcaacacatgacgttatttatcattagtgataatccgggcacaaatattctggataaagcgattttagaactttccaatgaaaataagataaatggtgtaaacctgattattcggaatggcaatcaagtaaaatccatgaatgaaaacgaactgagttatctgctgtcggattgcgatgcgtttatcggggaatggattagtagcgatgtcgattcggtcctgaccagcgttttagtcaaaaatcctgatctgtctaacaaaaaactgtttctggtattggaacctcctagcggcaacctgaactcggggtccagttccttgaacctaattcgcaacaacaccttgaattacaataagatctttaccaactattccaacgaggagttaatcaattactttaagaatactaaacgcggcaacagctattctaacattaacaattatctgaccaacggaaacggaaaaaatttcgattcaatttttaatcgactggttctttacaaggacttgaacgacaaaaataacctgaaaaaccaaatcttgtttattttaaactacctgggcgtggatgtgagttacgagcagccaacctttaccggtgtgaaaaactatggtatttaccgtgatcgctggtactccctggatgagtacatttctactttttttaaagcaacgaacaatcggacggtggggatcttggaaagcaaaatgtacattgagtcgcagcagctcaacacgtgctattcaattatcaacagcttggaatcccgtaattataacgtaattccggtcttcgcggatggaggatctgctgaacaactgaaggtcatggttgagtcctggacaagcgcgggagatgatatttccggatttttaagcaattcgtctaactttgatgtgtatatcgatgcgattgtatcgatggtggcctatggtgttggtggggaaaacttcacaaaagcgacctctttcttcgaagaagctggtgtgcaggtatttcgtgcggtgcactcggaccacgttagcaacgaacagtgggaactgggttcgacgggtctgaccaccgagaaaagtgataaatggtggcacattacgattgctgaagcgcagggaatcattgacgccaccttcattggcggtaacagcagctatatcagcaatctgaccggcgcgcagattaccacgtatatcccgcatgaagggaacatcgggttgcttgctgaccgtatcgactcttgggtggacctgaaatacaccctgaatgaggataaactgatatctatcatttattacaactatccgccgggcaaacagaacatcggttccagttatctggatacaataaaaagcatttataacatactgtatactctcaaagcggcaggctacactgttgggagtctgccagtggatgtgagtgaacttgaatatctaatgctgacctgcgggatcaatgtcgcgacctgggcaccgggcgaactggaaaaaatagctaaccggtcttgcataacactgcttccggtaagcgaatataactcctggtttaattcgctggacgaaatcgtccgcatacaagtgtcgaacggtactgttgcgtatatcggggagttaacgaagcgcgccgttgaactggattataccaaaaccattggaagcaccattgacgactggtataatcaagttgtttccttacttccagatgaaaaaagcgtggaagcaaaagaagtgctgagtaacattgtccgtgcgctgaaggattatgcgaatacgcattcacaggactattatagattatatttaaaatatttcgatgaatttaaggagctgaacattcaaggcttaaacggctggggtgaaactcccggcaatgtcatggtagtgaataaaaacggtaccgactactttgtcattcccggcctgaccttcggaaatatcttcgtggctccggagcctcagcgtggctgggagtcggacattaaaaatctttaccattgtacggcggttgctccgacccaccagtatttggcggcatattattatatgcagacgcgaaatccgaacgccatgatcttcactggccggcacgcgacccatgagtggttgccgggcaaagaaattcttctctcggcaactgattacggctcagtggttgttggtgacgtcccgcaattatacttttacattagtgatggcctgggtgaagcgattcaggccaaacgccgcggctttgcagttatcatctctcacctgacgtctccaatgtcctacactcatctctacggtaatttaacttttctggctaacctgatcaatgattaccagaaagcagggagcagctcagaaaaaaataagattggagaaaaaatccaagacctgatcattagcaacgactatagcaccaatttaggcctcaataagagtcaaatcaaaagcatttctattgattcactcatcgaaaaaatcaatatatttctcaagtcaactcaggatacgctccatccgctgggccttcatgccctgggcgagtattggagtgaggaggatatcgcgagcacagtgagcgcgatgctttcgcatgattttgttctggagaataatcagggcacccttaacctgttcaccgaactgtcgaattattactactcaaaatcgtatggggatctcacgccatttgagcgtgaatttgtcttgaataaatcgtacgatatctgcaaagccctgatttattgggatgtcaattctgtaagtaacgtactgattaatggcaatgtgaaatttaacaacagcaacttctatgcttgcctgaacttggcgaaaagctacatcaatcttattaatcagagcatttcaaacgagctaaatgccatgctggatggtctgaatggcagatacattccgaccggagagggtggggaaatcgtggtaaaacccagtatcctgccaaccggtacaaacatcttccaagaccagtcatctgaactcccgacccaggatgcatggaattacgccaaaattcttgcattactgaccctcgctgacctgaatgacacgactgaaaaaattatcatggggatctggtgtgtggaaacagcccgggatgatggtgcgttggtgagcactgttctttatttgttgggcatgaaacctgtgtggaccaacagctccagcgccggcttcgatgatgaaggcaacccgactggcaaaaaagtgggtgccatgccggaagtcattaaactgaacgatctgacgcgtcctgagggttggaacaaaaaacgtatagacgttaccatcattacgagcggcttattccgcgatctgtactcttcgcagtcggttctcatggacaatgcctttcgcgtcgccttggcccgttcatacctgaccctgatcaacaacaaaacgctcatgaatggcaaatatggcaaggaactgcgtcaggcattggactgtgtcatggagggtatcaactattaccgtgcgtctaatgaagctctgaaggacaattatgtggctcagcattggattaaagattgcctatattacttgagtattggttacaacgcctcgtatgcaggggagtgtgcaattacccgtatcttcgccccgccgaatggagattatggtgcaggcatctcaaaactggtgtcaatgtcatggacgtggaacaacacagacgagttagctcagttttacctcggtcgaatgggcaatatgtactcgaaaaactactggggagacacaaatcccctcgtatttctaaaagcactgtctaactcagacacaatcatcacaagccgcaacacaaatcagtatggggtaatggataatgatgacttcttcgactattggggtggtctgtccatggcggttgaacatgtgagcggtaaatctccaaaaatgaacgtgctgatgtatgcggataaggataatgcctatattagctcgcttgaagaagtcatgtatcgtgagattgcgagcaggtatgacaatcccgaatggattaaaggcatgatgaaagagggctacagcggggcgcgttacatgtccaacaagtttgtgagcaatctattgggttggcaagtgacccgcccggattccgtgtccgatgacctgtggaatcgcgtgtataatacctactacaaggacaaatacaatctgggtgttaaggactggctgatgagcggcaataatgcctattccctgatttcaatgagtggcaccatgctgagttcaattcacaagggttactggaatgctgatgatgccacaatccgcgatattgccaacacgtgggcgcaggcaacagtgaaaaacggggttgcatgttgcgactgcagctgtggtaacgtggcgatgatgcagtgggccgttcagtatgtaaacccggatattctggcccagctgttgccgaaactgtatgatgcgacggaaaacccagtattcttaaacaatactcataaccccaacaccaaaccggaaaacaacaacgaccctcaggtagagccgtcaaccccaaatcctactgatggttcttcgagcagctcaacgatttcgaataacgcaacgtccaccaactctaaccagcattccctgagcaatagtcaaaattcccagggcaatgcggtttcggatgtgggcgacagcagttccagtgattcaggtacgtttagttctgaaggtgcggatgtgaaaaaagcaattgaaattaatccgatcacccaacaatctgccagtgaagttggtatgagtctgctggccgtgttaggcgtcatatgtctgatccttatagtcggcgtcggttatttccgcgataatggaaaagagaag

SEQ ID NO: 76711 - DNA, 33 bp, synthetic construct
  source 1..33: mol_type = other DNA
agcaatttagatgagctgtttaacgaaaaactg

SEQ ID NO: 76712 - DNA, 36 bp, synthetic construct
  source 1..36: mol_type = other DNA
acggaacagattaccggcctgatctacagctataac

SEQ ID NO: 76713 - DNA, 60 bp, synthetic construct
  source 1..60: mol_type = other DNA
ctgccaaacatcaccagtatgatccagaatccgatggatgccattgaaattgcgagcccg

SEQ ID NO: 76714 - DNA, 66 bp, synthetic construct
  source 1..66: mol_type = other DNA
atggtgaccacgattccgggcagtgaaatcctgacttccggtttaaacatgatttcgcagagcctg

SEQ ID NO: 76715 - DNA, 51 bp, synthetic construct
  source 1..51: mol_type = other DNA
ccggggttagctgcgctgggcgccggtgatgtgaataccctggcgaacgca

SEQ ID NO: 76716 - DNA, 210 bp, synthetic construct
  source 1..210: mol_type = other DNA
tcatggaacatgcagagtatcgtgttttccgacacctcgcatgatcaaagccagagcgttcaggatagccacatgaatgtgaccgaggtaagtgaaggccaagaactgaacgacactctggattctgtcgaatcctcgggccagggttacatggagatgggaaaggtgtataaagatccgtcaacgggtaaattgattatggttgaaggg

SEQ ID NO: 76717 - DNA, 2508 bp, synthetic construct
  source 1..2508: mol_type = other DNA
gcagatgatctgcaaaccaaatacgcgggcgaagtttccggggatgttaatgtcgtgacggttaacccgtggaccactagcggcagtctgacctatgatattccgtccgaagcgaaggatatccgtagcgcagacgtttatgtgaacgtttatgggggcagtgccaagaatacctacggcgccaatgcgaatgtcagcctgaaaacggcaaatggtgagaaccagatagctaacgaatcgctttggattgaagaaggcagtagtgatggaacgatttatgctgtgaatgatcatatcaacaaatgttattctgattatcagatgcattatgacattactaattcgatcaaagggcttaatggttcgtcaattacaatcaaagtggacacgttcaagatggaaaacaaatcgtttgacggtaagatcaagctgattgctctgatcctggcctatgatgacggggacagtgacgtcattaattattgggtagatgcaacccaaaaatggacaaaaacgaacgtgacaaccatcttcaataccgaaaaactgagcaacattaacggtgctaatttaatcaatgtggcgcttagcagcggtgacggcagctttaaggttaatggcgaaataataggcgatccaattgtccatgattctggcaattattatcagtacaacagctgggacatttcggacaaaatgaaaaaaggtcagaacacggaattgctgtccatgaatgtggggtctggttcgtatgcctcgctgaagaacgtgttgtcggttttgaaagtgaacccgattaaagcgaatgtgtccctcgccacggagtatgcggatacgtgctacgccggtacgaacaataccattagtattaacgtgatctccgataagaaagagaagtactccatcgaattattagctgatggcaatgtggtaaacagcacggaaattgagctggatggcgaaaaccagacaatcctgttcctgaccgaccctactgttcgtgaagttgatgactcaactgttaatggggcagacaacgtgaaagtaaattacatggtaaacgtccgatttaatgatgttgttgttagcagtgccaacaaaactgtgcctgtgctctacaacggtaaccttggcaaagatttgtcttacccgtcaagcggattcgcctcatttgaaaatatttccttcacgggtgacatcgtaatcgatatcaaaaacgaaagcagctataagtcggggagcacgggtaccattgagatcttcaatgtgaacttaggtaaagattccaccatcgtaaaaggatttatctatgttccctacaactggtttaacggcaagaaatacgtggagaatgaaaccatgtttaatgtaaccttcaataatcagacgatctgcccggctggcttccaccgcgatcaaagcaacttaggcaattatggcaagtatggatatggggtggtggtttatgatgtaaccaactcaattaaaaatggcaataacacatttgtcctaaataagattaacccgaccccaacaatctatccaagcacgctgatctacatgtacaacaccaccggtagtgaagtcattaaaaacatttacattatcaatggtgcggatctcctttcaaacacaagtaacaacgcgggacgcgtcgttcaggcaaattcaaatattaacattaactctaaagatattctggacgcaaaattatacgtctttgcgtctggtgcgcagacgaatgagggaaacataatcataaacaataatgtcttcgaaaatgtgtggaacggaactagtaaaaccacagacctgtttgcgacagacataactgatattgtaaaagactcaaacgatattcgttttgtggcgactgggtcgaccattctggcgctgcagcaatttattgtcaccacaaaagatgctccgatcaaaactagtgtaaaacccacaaaactgtccaccacttatgattcaggtaaatactttaacattaaagttctggataatcacaaaaaatcagtgaaaggcttgaaactgaaactgaaagtgttcacgggcaaacgctacgcaaactattacgtaaccacgggctccaatggcgttgcgagctttaaaaaagcgtctaaactgtctatcggcacccacaaggtggagattaccaccaacaacaaaaactatgttgtgaaaaagacgatctcttatatcaaagtctataaagccaaaacgatcgtaaaagcaccgaaaataactgtcaaatttaaaaaatctaagtattttaaagtaaatgtgaaaaacaaagccactaaaaaagcggtgaaaaatattgcagtgaagctaaaagtcttcaccggtaagaagtacaagatctacaagattaaaaccaacaaatacggtaccgcctatctcaaaaccaaatacttgaaagtgggcagccataaggttattgtctattcgggtaatagcaaatactccattggtgccaaaagtagcattaaagtccggtgg

SEQ ID NO: 76718 - DNA, 63 bp, synthetic construct
  source 1..63: mol_type = other DNA
actaccatttttaacggtatcaatagcattagtaaacatacaggcaccatggatttcaacacg

SEQ ID NO: 76719 - DNA, 48 bp, synthetic construct
  source 1..48: mol_type = other DNA
agcgatattgtggacatcggcattcaaaatgcgaacttccagtttatc

SEQ ID NO: 76720 - DNA, 36 bp, synthetic construct
  source 1..36: mol_type = other DNA
tatgacgcgatgcgcggcagcattctgaccggtgat

SEQ ID NO: 76721 - DNA, 2124 bp, synthetic construct
  source 1..2124: mol_type = other DNA
gccacagagctgatcagtgataactccaacggcacgtgtattgtatcatcagcggcggttgctgaggataatcagatactgggtgaagtggataaacctgacctggtggtaaatattacttcggataatattgacgattattttatccgcgggcgcttaaaatccatttacgcctatgctaccctgtgcatctcggaggacattgatgatttgggcatcctgacaatcaagtccaacaatgttaccattaacgggaacaatcacaccttaaaaaacacggtcttcagcattgaagcaaacggcgtaacactgaacaacatcattctgaatatcactgaaaaatttgaagacaatgaaaactcagccattctgatctggagggcaaacaatgtgaatatttacaataccaatatcaattatattcctccacaagataccaccgcctacggtatttattctgaaggaaccaaacgtagtttgaacagtaacctgaaaatcattaacaacactattaactttgaaggcaacaacccgtctgaaggtcgtgattatgcggtttgtctggaatactcccccaattgcatattcgagaacaatacggttaacgcccgcctgccattacggacaatcgcattcgatctgacaaccgcgtatctgtattcagaatttgcactggccatggggatcagcaactgcaataactcgacatttaaaggtaacattattaactgcgatgtgaatgagagacctgaatgcagctttccgaccttggatgcaatcttcatttgtgattcaaaagactgtgaatttatcggtaaccaattgacgttaacggacttcaaatcatataaaaatcaaccgaattacttgtatggtctggatatttaccgagctgataatctccttgtggaggggaacaacattcacgtggagaccagcggcggcacttttgctgcgggcacggcttatccgatccagctgacggggccggcaagcggcatcatcattaaatataatgaaatcttttcaaaatgcaatggtccaaatattggtatatactcacagaacttcaatggtgaaaattatattactatcctgaacaatcatatcaatgtgactggactggccggcaatcatagttgggcactggtcgcgggcattgaagcccaagacgacaacgatattataatgaataatattatcgaaattcataatattcgcaaaaccaccaaggaggataacttatatggtatctcgtattcccaggaaaccaaagggacccactcgtataaagtcgtcaacaacactgtaatcagcgacggatactacctgtctcatatgctcgatgcggacaataccaccgtaactaataataccctcgttcgtacctataaatatgccgataccaattatgatccattcaaacgtggggatgcgataggtaaagacacggatgagatcaaaaacaatgatttttctggaaatcgtgttatcaccatctttgaatacgaaattgaacagcagggcgatgaaattgatgaaggggacgaatttaactacgagccgccgacgaatacgggcaaccattccaacattattaacggcagtgggatttctccactgaagccgggcttccccggaggcaacccgctaattcctggaagcaattctggcggcacaataaacaccggcggtaatggtaacgttggcggcttcacaaacccggacgtggcggacggtgataaggggtacattggtcttccggaccttagcggagacgacggtaaaagcttatcccgtaagtttaaccagcgcgcgaatgtgaaaacggtcaacagctttaataatcagggtgatgcgagcaactcttataacaatcttgtgagcactgaaaactccacgtcgagtgaaagtcccagcgttaatggtgtcaccgcgagtggcacgatttcgaaatccgcgtcttcggccggtgcagctggcagcagtggtgcagcgcaggagagcctcaaggcctacgagatcacgaaaaacattgtcgaaaacggtccgtacgatatgatccgcttcatcggcttggctataatctgtgaactgctacttattgtgggctacaaacggaag

SEQ ID NO: 76722 - DNA, 5472 bp, synthetic construct
  source 1..5472: mol_type = other DNA
gataacgacacttttacaaccaatgtgagtcagaatatttcgaacattaataccgatgagcagataaacatcctaacacagaaaaccgaaaacatcaatgaaatccaccagacgaccgaaaatgatcaactgtcgttctctatgcatccgccggacgataattattacaataacaaaaagggtgagatttatcatacgcaactgatattaacaatcgaaaatttcacgacgttcagcactgcaaatactacaatgaatgtccatctcgattgggacctgtacatgtcaaaagattattacgatacatgtcagatacgaatctatgaaaacaacacaaaaatccacgcgtttaacgtctcggaccagaataatgctgagtatgagcacaacgcccatcaaaccctcgatgtaaccttcccatatacaatcaaagatcgcactgagttgaaagccgtgattctgcaaattgaatcaaatacgctgtcgtttgaagaaatcaaaaaaattaacttaacgaatctgaacaacaacaatattatagtcaacaatacttatttctcgaatgaaaactggacgaatcagatcaaatacctgaaaaaagcgataaatgatgcgccaacaaacagtatcatttacctgaacaatatggaaatcctgaatgatgaggacataacgatcacgatcgataagaacatcactatcatcgcgaacaacaccatcattaatggattggatcatggaacgatctttaccatcaactcccaggctacgctcaccctgatcaacctaaccttcaccaacatctccacgaactacatcatgcagaataacggtaacctgaaaattgtgaacaataatttcaacaacaatattggccgtttaataagtaataacggcaatctgaccatcgaagacagtattattgaaaatacaaccaaatactatgcactgttccttaacaatatcaaaacgacgtcggaaaacggcctgatctacaataaaaaaacactaaacattaaaaatacgacgtttaataatattaatttgaatccattaaccaacaataacaaaaaattagattggaatgcgattatcgttaactatggtaaagccattgtaacggacagcaaatttaccaacatcaattatcgcaccatctacaacaacgcaatccttgaaatcaaaaacaccatcatggaaaacattacctcaacagacattttctctcatacgatccaatacacccggcaattaaataacactggaaaatatttctcatatatacgggccacctcatctctggaaggcggcgcaatatacaacatcaaacactccacaatcaccaacaccacatttcagaaaatcacaggcaaaagtggtgcgatctacaacaaaaaaacattgaacattacaaacaccacattccagagcatcaacaatggagcgatatacaacaacgaagatctgaccattagcaactccaccttccagacaatcagcggcgaagcaatctatactaaaaacgcaaatataaccaatagtcgttttcaaacgatcagcggcaaagcgctgtacaatatcggcacactcaacataaacaacatcttaatcaacaaatccaccggcatccataatgacggcatactgaccattaacaacacgatcattaataaatgcggaggcatatataacaataaccaactgaatgtcaataacaccctctttaatagatgcagcggggttggggcagccgtatacaataataacattgccaatattgaaaactgtgaaattatcgaaaaccatggagatgctgacaccaagtggcgttatgtcgagcagcctaatggtcaagtattttcatatattgtggaagtatattccggggtaatttataattataaaaacgctaaaatcaacattaccaaatcaattattaagaacaacgatatttcagaggaaagcaatggtaactgggatacctattatggcatcattaaaaatgatggggaaatgaaaataacgggctgcattcttgacgggaataaaccgcgcgagtggattgctttttggggcggtgatgggtcaattaacatttacaatactgggaagctgacttataaatacaactacctgctaaacacgcaatactataccggaaacattcacaaaccgagctcgtttttattcaacacggggaacggggcatgtgacgtcaactataacttttattgcctgaaaccatccagtatttttgcaaatgcgaattataattattattttgttccgtactttggtgagtatattccgattaagcttaatgaaacccggaatatcactttgtcattaggcctgaccaatggcgctgattatatgaccttcaacgattgggacaaattattaactccgggcctgaacgccaccattacgacaattgacgaaaacggggaatacaaaaacattaccacactgctcaaagacaaatacacgtttaacttcaactacacccatgtgaagggcgaatacataatttacagcaatatcttgaactttaagtcgtctgcgttggttgatgtgggcaaagaatttgcggaaatggaagtcaactacaataacatcacctataaagagggcaacatcacgttccacattaaaattaagggcaatctcaccacgcaaccgaccggcaacattacgctgcgctacaacaatgagaaaatcattttgaacctcaccgactccgaatgcagcttcaccattccggaaatcctgaaaccggacaattatactatgcgcattgactacgatggcgatgatgaatattttaaaatcctgaatcagtactttatttttgctgtgtataaaattccgaccaatattactgtagttgcgcccgaagttaaatatggtcaaaccggtctgatcaccatcaccatcaccccaggtgaggcgaaactgaaaggcaagctctacattaacggcatctacacgaaaaacgcggatacgcagggccatcgcattctgcgtattaatcgtaatcctggggtgtataacattagtgtggtttttgaaagtgatgagtattatatgggtggtgtggcgaacactacgtttattgtaagcaaatggaaaaccaatcttaccctcaccggcaaggacattaatgcgggtgaggatgcgattgtcaacattaccattgatccgggtgatgtgcgaggtgacgcgatcttgattattaatggcgtgaaccagaccatttttattaacaataccgtaacccctattacgattagcaatcttcagaacggcacatatcatgtgagtgtgtactacccgggtgataaaaaatatgctccctctaacgccagcacgacttttactgtttctatgaaaacgaccaaacttaccgttaacatcactaataatgatgatctgaccggcaatatccacgttaatactgattataatgactgtacgggggaagtgggagtgtacattaataacgataacgtgttgattatgaatttgacgaacgggtcttgtaatttccctgtgaaattcaagaggggcaacaattacatctacatacattatattggtgataaatattattcctacgcctcttggaacactacacgcttcattgagggcaaagccattatcaacacgaactacaaccacaccatcgatgagcaggaactagggtattacattatcaaaatatttgatagtgacaacaacccgtatgaatatacgaacttcacggccctgttccagaataaagaaatacacttaactactgatgagaatggtgttgcgaaactgccgatccagtgccgggccggaacctacaacattaccgtcaaatacaagaataccgttaaaaagagtacggtggtggtgaatgcaacccgcatggatattgatattaaggacattcttgcgggtgaaaatgaaacaatcacgatccgtctgccatacaatgcaactggaaacattacgtttaaagtggacaacacggtcattagcaaacgtctgagcaatggtcttgcgattgtcaatatttctgctttgactctgggagaacataaactgaccgtcttctacagtggcgacaacaattacactgatcagaaaatcgaaaaaatcttcagcatcaaacactccctgtcccaaatcattgcatcttcatcgggcgtcacgtatggggaggatgtgattgtcacgtctaaggttacatcaggcgcgagcggttcggtgacgtttgtcctgaaccatgaaacaattactgtgaatctgacggacagccaggcgaacgctgcctttacgaatgtgccggcgggaaactatgttatcactacccgctataatggtgataagacctataaagggtctgtttgcgacgttaaaatcaacgttaaaaaagcagtacccaatattatggtgaatacctcgccgttactgctgaatgaaaatatccgcattgatgctctgctgaacaatgatgccatgggtaatgtcaccttccatattcagggtcagtattcgccacgtaaccgtacagtgaataatggtgtcagtagctggctgatcagccccctgagtaaaggttcatataatctgattgtaacctactgtggtgacagaaactacgaatccataaccacttcgaaaatccttgtcttgaatcagaatgagactgtcttgaatgtgaacattggtgatgtaaacgcagacgatgatctgatggtatatgcaaccctgaacagcgacaacaagtataaaattacgggcaacattactcttgagattaacgataaatactataaggttgttgtttcggatggtgtgggcttacgtaatcttggcgagtttaaagccggccgctacacttatactgcgacgtataccggttcagatttgtttagcatgtccaccattaaaggttcctttaatgtacgttgcaatagctataagatcacgggcaacaaaaacattgtgcagtattatggcacatacaagtcttataaagtgcgcctgctgaacaataatgtccctgtgaaaaaagccattattaccgttaaaatcaataagaaaaacattaaagtgaaaaccgacaacaaaggctatgcaaccctgaaacttaaattaaaggccggtaagtatagcattacggcttcttacaaaaaagtcacggtgaaaaataaggtaaccgtgaaacctatcctgattacaaagaacatggtggtgaagaagggtaaaacagtaacctatactgccaaactgctcaacaaatatggtaaaaaggttaagaataaaaaggttatctttaaggttaagggtaagaaatacattgttaaaactaataagaaggggattgccaaaattaaaattaaaaagctgaaagttggaaaatataaaatccagagcatctatgggaaagttaaaaacaccaacaccattaaaatcaaa

SEQ ID NO: 76723 - DNA, 2511 bp, synthetic construct
  source 1..2511: mol_type = other DNA
aacatagacgagattggcaattcgtcctctgatgacacgattagcctcgatgatgatatcagcacgatcaatattgtggataacgagatctcaacgaatgttgatggcgaagtgatctgcgatggtaagagcactcgcgacacctactcttgggctgactttaaatcagaagtcgaaaacgcgaatatcaataccatcgaactgaacaaaggcaacattgctccctcgagcgattcgtccaatcagattagtatcaaccacgacataaacattattggagggtatgggtattatatcggtggtgacagctggagcagttcgacaaaatacaactatattccaattatcacttcgggctctaatctgaatgtcaaatttgaaaacgttaccttccagtacctgtcggacaacgtgtttatgaagttgatgggtaacggaaactatacctttaaaaactgcgtctttagcaacattaatgccacgggatcacatcagtcagtcatctggctgaattatggccacgccttaattgaaaactgctctttcataaaatgcaactgtagcttcggtgcggtcactaactattactcctcctggggtactgcggttaacaacgcgcgtatgacagttcgcgactcgacatttaaagacaattatgctaccactgaaccgggcgccatcaataactgcggacaattagttgtttatgatagcacattcgaaaataatgaagccgtgtggtgggcgggcgcaatccacacacacagtaatgcaaacacaaccattattcgttctaaatttaaaaataattacgcaggctggaatggtggtgccctgtacacctacagttacctgaccgtcatcaactcaacgttcacagccaacactgcaaaaaccaatactggtggtggggctattggagcgagcagttatatgagcacaccaaaagttgtgatcaaaaattccgagtttaaatacaacactgcgctgaccgggaatggtggagccattgtgatcagttcaggcaccctaaacgtggagagctccgagtttaccaataatacggcactggagttaaacggtggggcaatttccagcagcagctgtacggcggccatctctaactgtaagttcatcaacaacacgctgaacaaaaccgcgggaaagggcggggcggtttacggtactggaaaaggccggttaaccgtagataaatgtgaatttattaacaatgctgctaaagacaataactcgggccatgcgcttgcatactattatacgggcaatagcaatacggcagcctacctgacctacaccaataacatcttccgtggaaaggataatggtaccgggtcggtttttgtcgctaatgataaagtcaacattgtgcagtacaacaatagcattgacgatattacgaactacattgaacctgaaaacaataccaatggcactagcagtggcaatatcaccatccctatcggcacggatatactgtcatctagttgggatgtgatattgggtgacaacctgaacgggacctctgtgattgccggtaattatattctgattccagcaagtcatgatttgtactgctacaattacatcacccaggatcttgtgtggaatttcacaaccgaatttggttatttccatgagctgttggtggatggcaatattgtctatgcaccggcatcctgggacgcactgtatatctttaacttgaccaacggggaatctctgacttattcgaacatttatcagggctcaagcctctataaaccggtaatctataacaacactctttacgtaagttcggaatacggttatggtattaattccaataattggatctccatgattaagcatgattctgattactactactatggcagtattctggagctaaataatgtatcttatggcacgccggcgatcttgtcccaaccgtatatccacggcaatacgctgtatgttaacaccatacaaggtctgattgcctataacttagtggatggcacgagccataatgttagtggcacggtaggtaatccgattatcgatgccaacggcaatatctgtattctgtcaaacaatggtgctgcgattagcctccttaattccaatctggaagtggttgcttcaaccacactggatggtacctgcaacaagttaattagtgacgcgaatggtaacatttacacggtggacaacaacggctatatctattatgcgacatacacctcgtcatccatcacctgctcgaaaacgaaattcaacattaacccggtcagctcagcgatggcctgttatgatgggaaactgtacataggcgacaacaacggcatactctgggcgttcaacacgagcaaactcgatgaacccgtacttaacaacgcggtatatcgcgtgtttgatgcgggttctgccattgtaggcaatattgcggtggacaacgatggcaccatttatattgggaccgataatgggcatttttatgccatcgaatat

SEQ ID NO: 76724 - DNA, 4500 bp, synthetic construct
  source 1..4500: mol_type = other DNA
gatattaacgaaactaacctgaacgcagattcttttgaaatcgactatgacgattccatttctagctcatatgataccaatttacagaaactgaaccagaacgatattgaaaaaacggatgaatcgctggaaaaatccgacaattcctcaaatcgcctcctcaacgaagacaataacaacgggttgctgggtgatggcgatggtttaaagcacctttatgtggcccccaatgctaccggtagtggtctggacgaaaatgaccctggcgattttataacaatcctgaacaacacggaagataacacggtgatccatatgctggaaggaacttacctactttcaaacattaccccaatttatcaagatgggtactaccactttattagcattaaatcaaagaacaatatcagcatcgtgggagagaacccagataaagtaaaaatcatttccaatctgaccccgaaaaaacgcacgtcgtttatcttcagcttgcataatacgaacaactttaaatttgaaaacattacattcagcgcgatcaagaaagaccccaaaaaagaaaagacgaagtcttatttcctgttgaataagaataactatatttttgagaactgcaaatttatagacgcctattccaaatttgcgattatagaactggatgaggggacccacctcacgattaataattgttactttacatcaacggatggacatgttggacgtgaaatatcgccacgtctgttttgctcagtccttctgaataatactattttcaaaaattgttgccggtattctgattataaaatcggtgttatgggtaattatagtatttttaattcgcaatttctagaatatgatgataatcctctgttgtactttcagccatattgtaatctgatttttgagaataattatgtggaccacccgtacaacttcgtttttttccaaccatcggaccattacgagggttccaatcgtatgttttgctcacatactactcttacgtttctgaatggtgaggatagtgtgaacgtcaactgcggagatgtgattaatctgaacgcgtctttagtagacgatctcgggaatattctgagcctgtataaattgaagttcaacctttttgaaaacgacctgacatatacgaatggggtgtaccaaaaagaagtcaccgtgcctgatgtgccgggcgaatattacattgatgtgagtgatgaaatgttcactaaatatctgggcaactgtacagtgaaagcgccgatttttattgtgaaagaagcgcctgaatttctattcgatgataaaaacagcagcacgtacggcgaggacgtcatcatcaacgtggactcgctggatatcccagacgggaagttaacgttcagattcaacaacagtgaaataatcaaaaacatcacagactaccgctgcagcattaacttgggagtattgccggcaggtgaatacgcaattaccgcgtattatgcaggcgatgaagtttatggtgctaaatcctacacaaaaaccttcaacgtaactaaagcaaaatcgaccatcagcctgacgaaaggccatgtggacgccatcaaagataatggggatgtgggtttctacttcagcacaactgaaaacggcaacgaaaacaccataggtattatcctgccggataacgccactggcaaactgacatttaaattggacaccgatacttatagcatcgacattaccaaacgaaaagtactgctcggcaatctggactatggcagttatattattgcggttaagtacgatggcgataacaatttcaatgaaagtgaggagtgcacgtttaccctggtcaacagtaagccaagcgttgatctgaccctcaattacagcaatattaattacacgaatccgtttaatgttaatgtaactctcaatcaggatgtggttaaagataccatcatctttgaagtgcgcgatctggaggacaatcttattaactcaaccacgggaattattagcaataaatctgcgaatgcaactttcaccgggctcaacgccggtgaatacaatatcatcgcaatttatgaaggcgatgaaacgtactgtaattccatcgcaagtcagcgcttcaatgtgaacaaaattgatctggaatacttcacactaaaagcggacaaaaccatcagtattcacgacaacattaaagtggaagcgttaattcccgtcaacgtagggggcagcatcactttccggatcaacggccaggacatgactgttgagattttcaacaatcgtgcggaggcgattttcgacaatccgggtctcggtaactacaccgtttacgcgacgtttaatggtgatgataattataatcctcatgaggaaaacattaacatcacggtcattaaagccgatgcgaacctgagcgtttctgcagaaaacgttgattggggagaggaattagtggttgtggttaaaaccgacacacgcttcacaggcaacctgagtgttaaaatagatggggtggagaaaatagtggaaatcaccgaaggtcaggggaatgtgtcgttctctaatcttaaagccggtaaatataatgtggctgtggaatttaacgagagcgaatttttcacgtcctcgcagaaagacattaacgtaactgtcaacaaaatagactccgcattaacgctggataatgatgagatggtctttgattatggtggctctgcgtcagtgacctttggttatgacggtgccgtgaacgttacagctgaagtagttaaccatcctgaggcggtgattaagattaacgaggattgtatcgtggtttctgatttggatgcggggcaatataccttgaaagtcaccacggttccggacgaaaaccacaccggggtagacaaagaatttgaagtgaccgtcaataaaatagattcagccttaacgctggataatgacgagatggtctttgactacggcggctctgcgtccgtaacatttgattacgatggggcagttaacgtgacagctgaagtagttaatcatccggaggctgtcattaagattaatgaggattgcattgtcgtgtcggatttggatgcggggcagtacaccctgaaagtcacgactgtgccggatgaaaaccacaatagcgtggataaaaccatcagcattacagtaaataaggtaaatgcaaacatcaacatcgaggatattgtgttagactatggctcgcatgacatcaccgtatttaccggtgaaggtattgaaagcgtcaacgcaaacatcctgaaccagagttatgccaacgtcattgtttcgggcaacaatattagcatttacaatctgaacgtcggagaatatgttttacagttaattgttaatcccgatgaaaaccacaacagcgtgagcaaaaacgttaaggtaacggttaataaaatcgattctgttatcgatatccgtaacgaagtggtcttcacatacggtgatgcgggttattgtgatgtttattcggagggcgctgtggactttacggtaaaagtaatcaatcatccggaagcagtgattaacatcaacaagaatggcatcgtcaaggtgtcagctctgaatgcgggcacctatattatggaggtgaccaccaatccggacactaatcacaactcagtgaccggcagggttaacgtcacggtaaacaaggcggattctaaaatcattattccggatatcatatttgattacggtaattccggcagtgtgaatattctggtgtacaacgccacgggcatcggcaatgtcaatgttgttggtcatccggaagccatcacaaccattaatggcactaaaatcagtgtcggtggtttgaacgctggctcctatattctgacggcgaccgcgcttaccggggacaactataacccggtaaacgtctcggccaacgttattgtgaacaaactcaccaccattattggcgtgaaaaaggttaatggcgtctacggtagctccggcaagcttattgtgactttaaaagacagtaatggcaatctgttaacgggtaagttgctgcgtgttaaagtaggcagtatctcaaagaccctgacgaccaatcgccatggtcaagtctctgtcaacgttgcctatctgatcccgaaaagctataatgcaaaaatcagcttcgctggtgataatgacctggtcgaatcatccaatactgcgaaagtggtgatcaagaaagccaccccgaaactgaccgccaaaactctgaagaccaaagtgaaaaccaagaataaaaagcttaaaatcaccttaaaaaacaaaaagggcaaagctcttaaaaacaccaaggtcacgctgaaactgaaaggcaaaacgtataaagcaaaaaccaacaagaaaggcattgccacctttaaaatcaccaaactgaacaaacgtggaacattcaaaggaaccgttaaatttgccggaaacaaatacttcaaagccataaacaaaaaagtaaaagtgatcgttaaaaag

SEQ ID NO: 76725 - DNA, 81 bp, synthetic construct
  source 1..81: mol_type = other DNA
ttaccaattaatggcatctatcattacgacgcggatttcattcttaacagctttctgttgctggatggtctgccgtatgtg

SEQ ID NO: 76726 - DNA, 48 bp, synthetic construct
  source 1..48: mol_type = other DNA
aacaccggcatctttcagccaacgcaaattatgaaatatccgccgact

SEQ ID NO: 76727 - DNA, 33 bp, synthetic construct
  source 1..33: mol_type = other DNA
gcggaacaactggtgcaggccatttacagctat

SEQ ID NO: 76728 - DNA, 36 bp, synthetic construct
  source 1..36: mol_type = other DNA
attgtggcgccgaccattggcatcagtagcctgaac

SEQ ID NO: 76729 - DNA, 57 bp, synthetic construct
  source 1..57: mol_type = other DNA
ccaaacatcgcctcgtccctgacgaaaaatactagcccgattaccattgcgagtccg

SEQ ID NO: 76730 - DNA, 66 bp, synthetic construct
  source 1..66: mol_type = other DNA
atggtgttgaacattccggggggcgaatttttaaccggttcgctggatgttatcagtcagagcctg

SEQ ID NO: 76731 - DNA, 51 bp, synthetic construct
  source 1..51: mol_type = other DNA
ccggggctggcggcattaggcgccggtgatattaataccctggctaacagc

SEQ ID NO: 76732 - DNA, 198 bp, synthetic construct
  source 1..198: mol_type = other DNA
tcgtggaatatgcaggccatgattgacccagatcagagtatccaggagaaaatgcagcaacaaaaaacaaccgaagtcgatcagggccaacagttaaacgaaacgccggatacctccaacagctctggtcaggggtatactgaaatgggcaaagtttacaaagacccggcgacgggaaagctgattatggtggagggt

SEQ ID NO: 76733 - DNA, 750 bp, synthetic construct
  source 1..750: mol_type = other DNA
cttctgtccggggttggcagctcagagaacatagacattgtcggttctacatcggtgcagccggtagctgagaaattggtcgaaacttataaacagacccatccggatgcgaatattaatgttcaaggcggcggttctagtgtaggcatcaagagtgcacaggatggttcggcagacattggaaccagttccaaggagctgaaagaagatgaaaaacagggactgactgaatataatattggtcaggacggcatcgtcattgcggttaacaacgaaaatacggtcaatgatctgagcaaagatcagttaaaagatatattctccggcaaaatcaccaactggaaccaggttggtggtcaagatggcgaaatcaatattatcacgcgtgaagaggggtctgggacgctggatgcctttgagaacattgtgatgggcaaagacaccaagattcggagcgatgcagtcgtgcaaagcagcaccgaggcggtgaaacagtcggtgaagcaagattcaaacgccatcggttttgtgtcattcgctcacatgtcaaacgatgtaaaggcgttgtctatcgggggcgtgagccccagtaccgacacgatcgccgacggaagctacgaactgcagcgcccatttctcttcctggttaaaggcactccttccggtgatttaaaagaatttattgactgggttaacagttcggaaggtcaaaaagtgctaaatgaagaaaaaattattaaaagcacaaat

SEQ ID NO: 76734 - DNA, 81 bp, synthetic construct
  source 1..81: mol_type = other DNA
ttaccagcgtttcaagattatggtttcattcagtttctgttcggccagacctggagcccgaacgaaggccagtacgggctg

SEQ ID NO: 76735 - DNA, 33 bp, synthetic construct
  source 1..33: mol_type = other DNA
cgcttctattttgggggtaccggctttagcatt

SEQ ID NO: 76736 - DNA, 105 bp, synthetic construct
  source 1..105: mol_type = other DNA
gccggcaatgtgccaggtatcccgaactcgatttttagcccggttcgcactttaacgtccaacattgcgctggaaatgagttatgcaaccgggctgcatcacaat

SEQ ID NO: 76737 - DNA, 75 bp, synthetic construct
  source 1..75: mol_type = other DNA
gcggtgccgatcctgagttttgatttcatctttggtcaggttattgacgccggcaaatcgggcgggattagccca

SEQ ID NO: 76738 - DNA, 102 bp, synthetic construct
  source 1..102: mol_type = other DNA
gtcgggtcggcgacgaccatcccgattagtatgtttgatccaggtcgcccgttacccctgcatctgtatgtgcttgccactgaaggcgttagcttgcctaac

SEQ ID NO: 76739 - DNA, 42 bp, synthetic construct
  source 1..42: mol_type = other DNA
gaacacatcttacgcgattatctgaacattattcatggcaat

SEQ ID NO: 76740 - DNA, 48 bp, synthetic construct
  source 1..48: mol_type = other DNA
ttcggccagagcaccgcgttaacgtttccgattcataacatcccactg

SEQ ID NO: 76741 - DNA, 60 bp, synthetic construct
  source 1..60: mol_type = other DNA
ccagaaattagcgatggcggtcattttatgatggacatgctggatgtggcgatgccgagt

SEQ ID NO: 76742 - DNA, 639 bp, synthetic construct
  source 1..639: mol_type = other DNA
gaatctgatgcggtgcaggacacgggtggggagagtactagccggatcattaatgtcaaggttatctggaacgatgacggccaaacaaataaccgcccggattcagtgactgtccgcctgctcaataatgggagtgttgtcgattcagtgatcctgaatgagagcaacttttggaacggtaccttcaaaatacttgataatggaaattatgacgttgaagagacaggtgacctgagcagctactcgatttcgctgaccggcgatatggataatggtttcgtaatcaccaacaccattaagcaggcaccaaacaacggcagtgatgatatgattgtcgacgaaaattctaccgacaattcgagcgatgatgtgaatggcattattgatgactccaaccatacggttgatcagaatgatgctaaagacgaaaatcaaacggaaaatatctcccaggccaaaaacaccacgtataacaacaacgacaaggaaaaacaggtaataaaaaaagaaaacaaatctgttaaaaagaataacaccaacatcacgggcattaaattaaaaaacacaggactgcctgtggtggtgctagttgtagtgttgtttatcatcgtcattactccgatttcccgttggaaaaaa

SEQ ID NO: 76743 - DNA, 141 bp, synthetic construct
  source 1..141: mol_type = other DNA
attactaatgttccgggcaatctggtgcaaatcattcaggaatattcgaccagtatcaacgcaacggctgcggtcaactctacagcctccgctatgccagcggtatcaagtgcgagctgggccgcattaggtaccagcctg

SEQ ID NO: 76744 - DNA, 3579 bp, synthetic construct
  source 1..3579: mol_type = other DNA
gataaccagacaaacctgggtctcaacagcaatgacgtaatgctgagcgacagctactattttgatgctaacgtggacgatgatctggggaatgggagcttggattttccttataaacagctgaagagtaaccgcgtgatagacaactcgacaatctacttaaatgatggcatctattatggctttaataaagaatttagtaacctgacggtcatcggtaagaatagtgagaaaactattatcaaaaacattcagtttgatattaaaggttctctgataattcaaaatgtaacgctgattaactctaaaatcaccaataacgccaacataacgctggtgaacagcatttttaaagattctagcagcttcattggcggcgtgttaaagtcaaacccgaatacgtttgtcacgatcaccaattgtacctttctgaataaccatgcaaaccgctatgctggcgttatttacagcaataattcgaatctgaacatctgtaactcaagttttgttggcaattacgctaattattatggtggcgctatttactgcgagaaaaacagcaagctcacaatcatcaatactgatttcacaaataatcatgcgaaaaatgatgcgggcggagcaatctacggtatggatagcgatattcttgccaattatctgagtatctcaaactcgtcctccactttcggtggtgcaataactgccctcaacacaaatttgaacctgactaacttcaatgcttggaacaataaagcaaaatatcgtggcggggttatttatagcgtttatggttattacattgtgatgaactccacatttgaaaataacaccgcatctgatggaggtgcgctgtttattgacagcccacattccgtgaacgtttccagcaacaagttcattaagaacaacgctttaaatattgggggcgcggtgtatatcatttcgaacaaaaattatttcattcctgacaatctgtttctgaacaactctgccagttttaacaacgatttctataaaactatgttgtctaacctgaccattggaaataataattatgttttaattaattacaacggctcacatatcggtaacctgccgagcagttatgatttacgtgaattaaaccagaccacctctgtaaaaaaccagggcagcgggggtaactgttgggcgttcgccgccatagcgagtttggaatcctgcatcctgaaagcgaccggcaatgcgtataacctttcggaggaaaacatgaaaaatctcatgacactctactccaattacggctggaaagtttctccgaacgacgggggctacactagcatgggcattggctatcttacgtcctggctgggagcgataaatgagagtgatgattcatattatgagtcatctgccctgtcaccagtactggacagctttattcacgttcaaaatattctattcctgaaacgcaatagctatacggataatgatgaaattaaaagagcgatcatcgaacatggggcggtgtcaaccagcgtattttggaaggtagagaaatatgcgaacggtgaaaactactacaattatgaatatgcgtcgggttctaaccacgccgtcgtcattgtcggctgggacgataactactctaaaaataacttcattaaaaaggctccaggggatggagcatggatcattaaaaacagttggggtacgggtagtggtgacggcggctactactatgttagctactatgacgcgcgtctggcaccgatcaatacctcatcggtgacgtacaccttcgtgttggccgattcgattaaatatgataaaaattaccagtatgacatcccaggcatgacggactatctactgaacagctcggatcgtgtctggtataaaaataagtttaccgcgacagacgatgaatatctgaccgcggtgtcgacatacttccaaaaagaaacgtcatgggatttgagtatctacgtaaataacaaactgatgctgacgcaatccggtaactctagtgcgagctacagcacaattgaattaaaccgattcatcattcttaaaaaaggtgacattttcgaaattgaatttaaaatcacggtggacggtgatgcaggggttccgatcagcgaaatagcgtcgcttaacaatctgttctatggtgaaaatatttcctatgtgagttatgatgggaagaaatggattgatctgtttgatgtaaggtggacgtatcctggccacacctataacgattcgcaggtagcgtgtattaaggcattcacggtattgaataaaatcaactccactattgtcctcacaattaccgatgagaataatcccgttgaaatcacggctaaagttctgaaccagtacggcaacccgattaagacggggaaagtcacctttaatatcgaaggaaaagattacattgcgaaaattaataacggctttgccaaattgattcatatttttaacggcaacgaaaacaaactcatcattgcgagctttagcggtgccggctttatcgaatctttctccgatatcacgttttgcccggagcaggtgtcaattaaagcaagtgacatggtttcatattataataaaaattcgtattccatcactttgcttgacatatactcaaaaccggttgcagacaaggaagtcaaatttaaaatcaataatctggagtatgtggccatcactaatgagaatggtattgccgccattacctttaacctgtacccgaacgtgtatgacgttatcattgggtttaattcgatcaattttgataactataacgtgactaaaaaaatcacgatcaagtcgaccatttccattccggaaaataccgtgtacacctataactcaaaatatccgattaaattgctgaacaacaacggaaaccccctgtccaattgcaaattcaaacttgtgattaatggcatcaccaattacgcacacaccgacagcaatggtgctttcaagtacaatattaatttaaaaccggggaaacacacgatcaccgtgatcaacaccaaaacaggtgagaaatctacccaaaaaattaaagtggtcagccggataactcagaacaaagactttagcatgtactatggtgcgggtcggaattataaggtcaaagtggcagatgattatggaaaagttaagaaaaaccttaaaatctcgtttcgcgtgaatggcaagacctactatcgctacactaacgaaaaaggttatgcctacctaaaaatttctctgaaacctggcaaatacacgataaccgccaattataaaggatacaaagtctccaacaaaatccgtgttaaacccacaatcatcactaaaagtattgcagtcaaaaagggaaaaaccggcaaattcaccgccaaactgctgaacaacaagggcaagatcttaaagtacaaaaccatcaacttcaaattccgcggcaaaacctacaaagtgaaaaccaataagtacggtatcgctacgttaaagattgcgaaaaaatataaaattacccgctactcaataattacgagttaccgtagtgaaaaaatcaagaacaccattaaaattaagcgt

SEQ ID NO: 76745 - DNA, 3534 bp, synthetic construct
  source 1..3534: mol_type = other DNA
ctgaacgtggatgacaacgcgaccatcgaagacactaatttgaatagcatggatgttaactttgatatttccaatggcgaatttaacagcattaacatcgataaaacgttcgacaccaacatcgacgctgatgccggaaaagacacaaatattgaggaaaaaacgattagtattacgaactctaataattccatcctgtccaccaaagagaacaacgttaaaaacaactttaaactcaattccggttcactgcgcgccgggaatataatctatatcagttctgatggtacgggggatggtttgaccagtaacaaccccacaaactgggctaacggctacattaacgcgcagtcaggcgataccatttctttccttgatggaacctacaatcttgtaaacgtaaatctgaataaagacctggttctgaaagcgtttaatgaaggaaatgcgataatcaatgccaatcgagctggtaatgtcttttctatcaataataatcggaacatcaccatcaacggtctgacatttatcaatgggaaaagcacgggcaacggtggcgccatttcattcaattccggagccctaaccgtcattaactgccgctttattaacaacactgcaagttcgtatggcggagcaatctacctgcgtgatggaaagctgaccatagtcaacacaactttcgtaaacaatagcgcggatgtgggtggcgcagcgatagcggacaccatcagcattacccattcggacttcattaacaacactgccgacggttctggcggcgcgatccgcgcttatgacaacctgacaattgtggattcgatttttacgaataacacttctatcaatgggcagggcggcgcgttgtacaccccaaatgttgacatcaataattcaatttttgtcaacaacacgagcctgaacgggggaggggcaatctactccagcaatgaatatcttattaataattctgtattcgtgaataactcggctattgatggggatggtggcgcagttagctcataccgtaccggcaatataaacaactcgaactttaccaacaactctgcgaaaaagagcgggggagccgcgtatgctcgcgagagcattgaaattgataattctagcttcaataaaaattatgctggtgcgggcggcgcagtccgtgcccaatccgaagttaacattaccaattcaaattttaccaacaatgtggcgaacaatgagggtggggcaatctattctaatggcaaaattgttgttaacaatctgacgtttatcaacaactcggcgattgaaagcgatggtggcgcaatcttctcggtagaagatgttgaagtcgataactccaattttatcaataattatgcaggtgaacttggtggggccataagcgcgtataacgaacttaccgtgaacaattctaatttcaccaacaacaacgccaaatactacggcgggggcgtgtatgctaatgtgttgaatagtaatcgtgataattttgttaataacactgccgagtataatggcggcggcgcgtatgtattctcgaatgcgaatattaacgggtcaaattttgattccaatacggcagtgaatggtggcggcctgttcagcacgggcaactctagtgtgaataattctaacttcattaataataacgcttacgatggatctgccattattagtggcaacctgcacctgaataataacaatctggaaaataacacatcgcgcgggtatggcattgtatatgcggaaaacgccaccattgaaaataataaatttatcgataacgatgcactggaggataaagaaatctacgtcctcaacgaactgagccagagcaataatactctgagcccgaatcaaatagaaaatattaacgcgaacacagtaaaagtgaacacgatcaacgggacgacttatttggttgatctggaagatgggctgaaaggctattgtctgcagcgcacattaaatttccccgattacgtttatctgctgaacaatctgagcttagcacataaccagctgactggggaggatgtcagtgaatacctgaagattctgatctataaatattacttctccgacaaaaaagacaatataacttacagcttatgggactttacagacagcgattttaggaatagtaacaacaatttaacgaaaaaagtcattgcattatataactcgggattccgtgtaccggattcgaacgcgagtctgatcttggacaacggtacgcaggtcttatttgatttttatagtgcgggaagttccacaacgcaaaatctgttcctctttaatattacatatatgggcaacaactatgacatgaaagtggaaaaaatcaccttaaacaaatcggtaattaatggaaacaagaccaaattcatcatcagagtcaccaacattggtgataccattctccatggcgtgactgtatttgaaaaagagtacgacggtttggtgtacgactcatacatcgatgaaggcaataactggaactataacaacggtaagtggatttacaaaaaacaattaaacattaatgaaagcgccgaatttacagtggtatttaaaacaataaaatccggtaatttcaccaacatcatcatctcatcatccaatgaaaccacaaacaaaaccactaacaacaccaccactgtttacacgccgaacctaactgtggagaagctgtcgttgaaccgcacggtttatgttggtaatcagactgtctttaccattgtcgtccgtaacaccggtgattgtgatctgggtgaggtctttgtcgtggaaaaagcgccagagggtcttgcgtacagttcatttaaaggcaccgactggtcctacaacaatggcaaatttacctatggcaagactctgaaggtgggcgagagcgttagttttgagattgtattcgacgctgttagtagcgggaactggaccaatgtcgtggtggcaggttcaaatctgaccggtaataaaaccggtaataacactacgaaggtttataacccgggtttgaaggtggaaaaaatcactttggacccggtggtgtcggtgggtgagattaccagctttgaaattatcgtgacgaacaccggtgattgcaaacttggtgatgtttttgtgcacgaagatagctacgaaggcctgcggttccatagtttccgtggcgatatgtggaagcagaaaggtgatacgttctattatcagggcgtgctgaaccctggtgagtcagccagctttgtaattctctttacgaccttaaaacctggcaacttcacaaatattgtgacggccggttccaacgttaccaacaacaccacgacggaaaacaaaaccaaggtcatcgaaaaccacaccaacaataacacgaacggcattaataaaacagtgaacaacgaaaccaaagaggttaatgttcataaggtggacacgtcacgcgccacgggcaatccgttactagccctgctcatggtgcttctcatgattagcgtgacgtcggttcgtaaattcaaaaag

SEQ ID NO: 76746 - DNA, 4746 bp, synthetic construct
  source 1..4746: mol_type = other DNA
accgataacaacatcacggatatcaataacgtcaactctaatctgtccaatgtattgaaaagctcttctagcctgaatgacggagacgcaatttcatatgatctaatggataataaagatgtgatctctcaaaaattttcttcaaatagcaatacaaatgataagtcaaacatgtccgatgtggtcgattcgatcgaatcggtggcagaaccaacgagtctggatagcccgatcctccgctccgtggtcccgagcggcatcacattcgacggagtgttccacgtgggtacgggccagcaatattcaaacatccaggacgcactggatcagtgcaggcggggcggatataactatcagattattatccatgaaggtacctataccggctatgggaacaaaaacttggttatcgagccgaccacgtggtggaaccctaactttggttacctcgatatcagaacggcaaatgatggcgatgtggtaatcctgaatgcagaacggtcgccaagcattttaacgattaattctcgaaacgtccatattacgggattgacattcatgaacgcctataattacggtagcggtggaacatctggtgctggggttgccataaacattcggaaaggaacggtatcgatagataactgttcttttattaacaatgaagcgcgcaatctgtggggcggtgcagtccacatcgactcaagcatcacaaaccgtatttcgaacatagatattaccaactcgctgtttgtgaacaacagcgctgaggtaggcggagcattccgttctgaacgctattcctccaatattaatatcattaacacgacatttattaataacaccgcgacggaacacggcggggtagcatgtctcttcagtacagatgtgacatttgcaaattgtacctttataaataactctgctccgtcatctggaggtattcactttcacgtgggcggctcacacatcgataattgcacgtttataaataacagcgcgtatggtaccggttcgtctgaagaaggttacggtggagctattgcgctggtttattccaccagtgatggtgtgattatctccaattcgagtttttccaacaacttcgccgggaaatacggtggcgccattgatgtaaacggcagcggcagtaatgctaaaatcttgaactgcaacttcgaaaacaataccgccggttatggtggcgcgatccgtgtgcagggctccaacacagtgatcgataataacagtctgattaacaataaagccatcaatacggatggcggtggaatccatgtggaaggtagtaatacgcaaatctcaaatacgatttttcgaaacaattcggcggcggcgaatggcggtgccttagccattgtggccggggataacacatttgtgtccaactcagtcattgccaataacaccgccgtgaatggcgcgggtgcgtacattcaaggccgccgcgtaaccatatccgattcgattgtcgcgaacaatactgcagaccaaaatggtgcaggagtgtacattgacggcagctacgcgactatcaaagactcgaccatttacaacaacaacgcgactgtcaatggggggggcgcttacataaacggtcgcgatgccactatctccaatgttaactttgtgctgaacaacgcgattccggatgaagaagctctcgatgatgggcttgggggagccatttttatcgctggttccaactcctatattgaggatagcaattttacttataatactgctcgtaacgggtccgcgatttacatagacccgacaagctcgatagcaaataattacatttataactgcaacttcacggaaaaccaggcctggagttactggctccctattttctataatgacgtaaccaaaaccatcgaatctaatttaaccggtggaaacaatatcctgaatgcgatttacaataacggaagcaacttacatattttcattgatggcgtaaatccggtgttgggatgggagaactctcaaaatggtacaataatgtaccaggataaccgtgagtttaaccagaccattgtaacgctcgtgtgggatcgccatggtaacctggtatttaatgaaaccgcagtgactgacttagcaggtaatgtttgctatgacattccccaagatacccatctgtggtttattgtgagtatgactcacttagaggatacctattataaagaaattaccaacattacgggtatcaatattaacccggggttgaccattaccgacgtaaccatgtatgagggtaattcaactccgcaaacaatatatattgttctggctgatgacgatgcgaatcctatcccaaacgaaggtccaatcatgatctacgtcatggttaacggcaataagatccttctggggagcggtaacacgagcaagaatgcagtattgattcttaatgaaagcgccgtattcaaaacattaaaccccggcaactataccattattgcagaatgtacatatgcatattacaacgaaacgacgcagtccatctcgaataaaaccgtatcaacggaaggcattctggaagtccttccctacatctggagtcttaataaaacgatctcgcatgtgaacggcattccatatattgagggcatggtgatccagatcaatgataacgtcaccttcaatatcactgtatttaacgaagtcaacacgacgttatacggcctgaaactaatcgacctgaataccgaaggattatcctatgtgtcgactctgccgtccaactggaattatgaaggcaacaatgtctggacactggataatctagtgaattatggaaattcatcactgtttgttacgttcaaagtacttaaaactggcaatctgacgaacattgtgaattgcagcttcctggacggttttaaaaacaaaagtgccaacatcaccttcgcagttaacctgaccgcggatctgggggttagcaaggtcgttaatgtctcgaatcctaattacggcgatttcatcaagtatactgtagttgtttctaatgccgggcctgacgacgcgacgggcgttgttgtcaacgagaccctgccggtggggctggtttacgttagcgacgatgcgagtgtgggcagttacgatcatgtcgcggggttgtggaccgttggcagcctggctaaaggtgacagcgcgacgctgattgttgtcgtgcgtgtgggcggtaccggcaacatccagaattttgtgaatgtcagcggcgccgagtatgataacaacactgggaacaataaggccaatgttacggtggcggttaacgccagtgcggacctgggtgtaagtaaggtcgtgaatgtctctaacccgaattacggtgattttattaagtacactgtagtcgtgtcgaacgctggccccgacgacgctactggcgttgttgttaatgagaccctgccggtgggcctggtttatgtgagcgatgacgcgagtgtcggcagttatgaccatgtggcgggcttgtggactgttgggagcttggcgaaaggtgatagtgcgaccttgattgtggttgtgcgtgttgggggcaccggtaatattcagaactttgtgaacgttagtggtgccgagtatgataacaacaccggcaataataaggccaacgttacggtcgccgtgaatcagcttaaaacctatatcatcgtttttaataataccgtctatccgggcgatgacgtgacggttattgtgaccgtgaccacccagaacggttcactgtttaatggtaacgttaacgtggctcttaatgataccgcaaacaccaccaaagtggttacgattgttgatggcaccgggagcttcaaggttacagtcgacaaaaatcttgtgaacggctatgtaattggtattaacgccagctatgatggcaatgacacttatattggctctaaaggcttcggttggattaaggtgctcccagtcaaattccatgtcgaaaaaacgatcgtcaaaggtaacgaatttttcatcggcgatgagatcatatttaacattaccgtgtacaacgattgcaatggcaccctgtacaacctggttgttagcgacgtcctgcctaacggtgtggtgctgatcaatagcggcttcgggctctggacctacgatgggggctcgtcgtggagctatggcgacctgtccgcaggcgcgagcgccactttgatcattaagtctagcgcagtgaaagcgggtagtttcaccaatgacgccaaagcgacagtcaatgacgtccttgacaacagttccctggtggatttcagcatctcaaaattaaatactagcatctccgtatctaacgttacagggcatccgggggatgtagttgtcatcaccattaaagtgagcaccggagataacgtgccgtttaatggtgatgttgacgtcattctgctcgatggtaaaaaaattattgttcatgtaacgaacggtattgcgaagtttaaatggaccatcccgaaaaacgctaagaacaacacgatatttagtattttcgtatcatttgcgggcagctcaaaatactttggctcgaacaatacgggcttcatcaaagtaatcgataacaaacagaacaaaactaatcacacagacaacaatgattttaccgataaatgtaataaagggatcattaaaaacactggtaatccattattagtgctgctgatttcaattgtgattctggtgatctcactgaaacgtcgcaaagactac

SEQ ID NO: 76747 - DNA, 42 bp, synthetic construct
  source 1..42: mol_type = other DNA
agccagaccccggcgaacgatgacaatagtattcgctttggc

SEQ ID NO: 76748 - DNA, 81 bp, synthetic construct
  source 1..81: mol_type = other DNA
aacgacttaaatattgtgagtaccgcaattaacgcgtttctgcaaatgggcagccagatcatctcctgcatggccgatccg

SEQ ID NO: 76749 - DNA, 45 bp, synthetic construct
  source 1..45: mol_type = other DNA
gcggggtttgaaagcgttggcgtcacgaacgtgaccggtttcggc

SEQ ID NO: 76750 - DNA, 105 bp, synthetic construct
  source 1..105: mol_type = other DNA
tataccacgattttggggggcgaagatcaggccctgatcgctattatgaaatcaagcccgttatcctttaacggtgtgttcactgcgctgagtcaatcggacgca

SEQ ID NO: 76751 - DNA, 60 bp, synthetic construct
  source 1..60: mol_type = other DNA
ggtgatgttggcacggcgaattatctggtgggggtcttaaaaaacaccctgccgcagttt

SEQ ID NO: 76752 - DNA, 36 bp, synthetic construct
  source 1..36: mol_type = other DNA
gcctgggcggtgggtagtggcgatatgagctttacc

SEQ ID NO: 76753 - DNA, 450 bp, synthetic construct
  source 1..450: mol_type = other DNA
aactcattcagtctgatcttcaacgataacggcactaatgatgccaatgatgtgaatgaaagcatgataacggtaggcgcatcaagtctgccggaaattgaaaactttaccgacaataccttaaacgacaccactattagtctggtggattccaacaaaaatatgacaatccttgtttcggagatcgataactcccagtcaattagcgacatcttcaataactttgtcagctccaacgacatttcttctacgcagacaatcgatcaaaacggtgttaccacgtatttggcgtacagcagcggcagtgattcatataatgctgatattttttttaataagaacgggcagaactattgcattagcggagataatattctctcttccgatagcgactactttatcaatcattgtaaaggtattatcgacgcgatttcgataaattcgacctcg

SEQ ID NO: 76754 - DNA, 39 bp, synthetic construct
  source 1..39: mol_type = other DNA
gtgccggccattgcgcaggattttgcaatgaataacgtt

SEQ ID NO: 76755 - DNA, 33 bp, synthetic construct
  source 1..33: mol_type = other DNA
taccatctgcagtatgtgcgcggctgggatgcg

SEQ ID NO: 76756 - DNA, 54 bp, synthetic construct
  source 1..54: mol_type = other DNA
atcatgggcaacttagaactgagcccgcagtatacgaccatgattattcaagcg

SEQ ID NO: 76757 - DNA, 621 bp, synthetic construct
  source 1..621: mol_type = other DNA
gttgggaaccgcttcttcatcccgcactatgaaactattgcggacactgatatcgggacggtagaggtggcgacctacggcaacgccaatgcgaccaaatgcatcgcactgattacgggaatccatcctcgggaaaccctggctattaacccggaaattgacgccgccaaacaatttgcaaatgatgatgttaagatcattcattataaagtcacagttacaaaaaacgcccaggactacagtaaaggccgtgcgaatggtgaatccctggtgcacaactatgtaaatccgaacgtgacggcgtcggatgctgatgctgttatcattagccactcacatatccctgagtatggcgaaggcttttacgtggcgacgccagccatggacaacgcaagcgttaaaatcggtgagaatataaatcagagcagtgattttaactattatccggtcaccggtaacgaaacatacaaatccacgtctgccgtgcttgtgtcgaagccgattgcggaagcaggttaccccacctttgtatacgaagtcccagagaatgtcatggaatttattataaccggcaaaaccaaggatttattccagttgattattgaaaacacttatgataat

SEQ ID NO: 76758 - DNA, 2883 bp, synthetic construct
  source 1..2883: mol_type = other DNA
tcagataataccacggacgactcggttatcgactcatcgaaccgcgatgttgtcagcgtagatgataataacgtcgttagtgatgagtatgcggtgaataaagtgagcaatggggcgctggcggatgttaacggtgaagaaaacgtaaacaatgatgtggacatggtgatcgatcctataaacaatgtatctgtgctgcagggcgataatgtggatgtgaacattacggttaagaacatcggggaaaataacgctagcaatgtgaccgtgaactttgaactgccggatggctttagcttaattgattctaataatgtctcagacaacacgtggcatatcggcgatctccagtccagtaaatctaccaacatcactgtgaaattaaataacagcggaattaataatggtgactacgtgattaacttaaccctacgtgcgaacgaagggattgaggaaatctttaaacagaatgtcaccgtgaatgttatcaagaaacttattcaaaccaacctgactattgattttgataaagagtcatatgtatatggggatgacgtgggaattgatgtgaagttacctgatgatgctactggtaatgtgaccataaaaatcaatggcacagaaaataatgccagtatcaatgaggtattgatcctctcgaacttgacgccgggcaattatgaagtgaatgtgacctatagtggggatgacaaatacaatggcagctctggtaaggcgcgcttcacaatctccaaagccaacacaacggctgcaatcgacatcgtcagtatcaaggtggatgacgagctgaatatcaccatcaattatgattctgaaattaacgggaatgccactatttatgtggacaatattaaaaaccagaccattgaaattattgatggcaacggcaatgtgaccattaaaggcctgtccaaaggcatgtatgacattaaagtagcatttgatggcaacgattgctataactcctccgaaactaacaaaacgattgaaatatctaaaaacaccgtcaacatgttgatcaacgtaggagacattgtgtatggtaacgacttggtgattaacctcaaactcccggacaacctgacgtcaaatgtcaccgtcagtttgggtgacattaatcgtagtattaattgcagcggcaacgtaacctttaaagatatgaacgctggaaactatacggcaattgttagttatggcggtgacgaaaactactttaatgaaacaaaatatgtcgattttaaaatctacaaagcgagcacccagaccacggtcaacacatccgatattaatattggcggcgtgctgaacgtcagcgtcgatccgaagattgatggcaccgcgacggtgtatctgaacggaacgaagtactcagacgacattgtaatcgtgaatggtagtggcaatgtcgttatttcaaatttaatcgagggaacgtataacgtgcttgcggtatttaacggcaacgacaactataactcctcacttaccaacaaatccatcaaagtatcccgtaatgtgttcaacattactgttaacgttacggatgtctgttacggtcaagatgtcataattaacattacattgcccggtgatgttaccaacaccgtcgatgtggtttttggttacaactctcaaaatatcaatcttgaaaatggggttggcaccgttaaatttagtgacctggatgtgggtaattataatgcaacggtgatatattatggtgacgcgaaatacctgaaaagcactcagatcattagcttcaacgttacgaaagcgaaaccaaccgtggatgtgaatatttccggcaacaagcttggtcaggatttagtgataaatattgcactgccgagtgatgtaaaaaacaacgtgaccgttggcatcgacaatatctcgcaggatgttaaagttaccaacggtgtgggtaaggcaatcttcaaggacctgaccattggcgagcacgtgctcatcattgactatagcggtgattctaactacctgaatactactgaaggaatttacttcaatgtctcgaaggccatcccggtcattgatattgatgttaagaacatatatgtcaaaggtaaggaggttatagatatcgcgcttccagatgatgccaccggttcggtaaccatttttattaatggcgttgaacaaaaaaccgttaatgataacatcagcagcattgttctgaccaaatctgggctagcggccggcacttacaatgtgatggtgagctacacgggcgactctaaatatgaatctgcaaacacaactgtccagttcaaagtttcaaagtacaaagctaaattgaccgcctcaagcaaaacgtacaatgttaaagtaaagaccaaatattactacattacgctcaaaaacaacaagaacaaagtaatgaaaaagatcaaagtctatctgaaagttaacggtgtaacatattccgcgacaacgaatagctacggtaaagcctcgttcaaactgagcaaactgactaaaaaaggaacatatgatgctctgattacatataaaggcaccagctactacaataaactgacgaaaaaagttacgatcgcggttaaagcgacccccaaactgacggcatattcggccaaactgaagaaatcggtgaacgccaaaaagtacagcgtaactctgcggacagacaaatacaaagcaatgaaatacacaaaagtgactttaaaagttaatgggaagatctatacgctgaaaaccaactcactgggtaaagccactttcaaaatcaccaatctgaacaagaaggctaaattcctggccgtcattagttattcggggagcaaatactactattcggcaacgaaaaaagtgatcctgaccgtccgc

SEQ ID NO: 76759 - DNA, 54 bp, synthetic construct
  source 1..54: mol_type = other DNA
ggcattatcgtggccgatccgtccaccatggttacgttaggtagcctgtttagt

SEQ ID NO: 76760 - DNA, 120 bp, synthetic construct
  source 1..120: mol_type = other DNA
gccggctttggcgtgggtgacatcgctatgccgtcagttccaacggaatttgtctcgacaaccattgatacttccgtattcggtgcgtttgcaagtgggttcagccagctgttcaccaac

SEQ ID NO: 76761 - DNA, 3144 bp, synthetic construct
  source 1..3144: mol_type = other DNA
aaagaaatatatgtgtcctcggacggtagcgatgacttaaacgggaccgatctgaataacccgtgcagcttccacaaggcgattaacatttcggaagacggcgattcgattaagatgaaggccggcaactattccatatcggaggaagttgataaatcgttaaatattagtgcctacagtgatgacgttgtcaatatcaagaataaattcagctatgtgttcaaggttaaaaacaacaatagcctagtgctcaattctctgaattttaaaaactttaacacagcgatcgagtcctattcatatccaaatatcatgattaaaaactgcctgtttgaaaaaagtagctatatgtgtctcaatatgcggggcggcactactattataaccgactccatcttccgtaataacacgggtagtcagggtagtgcaatcaactttcagaatacgctgtataaaaaccgcagctacctgcatatcaacaacaccatctttgatagcaaccacgggacaaacttgggcggagtgatttacatttctctgtcaaacatgtacctgtacaataatacgttcattaacaataaagccggctatactggcggcgtaatctttaatgatgtatcgaaagtttacgacaaccgttcgcgttatataaataatggcgccctgtactcgggtggtgcgatttatattcgcggtgacaaagatctgggttcgtattatggcgaccatgtggaatttataaacaattctgccccatataaaaacggtgattcgggcgggtacgggacttcgggaggagcgtttaccgcagtagacggtggagagatcgtcctgaagaacagtgtgctggaaggaaataaagcaatgtcccgtgggggtgcaatttggtcagatcagaaagtgagtattatcaataccctgatttcaaataattctgcatacaacgaaaccggtctaaccgtgggtgggggcctgtattgtccgctgctgaaagtaaacatcatcaactctaccttctcaaacaatcatgccaaagagtatccggatatttttaatgatatcacctttccttccgtggacattgttgaaaacattaataacaccgatggtaaaaaaattagtattaaaaatctgaccaaacccgtaagctattgcttgcaacctggaattttgaatattgcttcatctccaatcattgaaacgggcaccaataaactccttggttctggaggctacttcaatgggaagccgatcggtgaattgttgaaaatctttatagtccagaattaccaacgagtcctggataagaaaattagcgaaaacaccttcaaaagcatgttgggttttatctcaagcggctgcagcagcctaccgtctccatttaatgattcttattacctgtcacaccgcttaattaaagaaactctggatgaatatgaaaaaggcgtgcgctatcccgatgtaaatgcaaccggcccgattaactggttaacaaaaaaatatctcacattcgacttttaccaattcagcaatgaagatcatcaagatttgatcgtgttcacattcaacgaatcaaacaccacccttaatccaccgatcaacgtaacgaaaaaatcaaacactacaaatccggacttcaacacggtcgtatcgtacgtgatcaccgtaaaaaacaccaacaaaaccagcatggtctttgacgcgctggtgattgacacgctgagtgaaggattagtgtataatggtgcttcccacaacggcgtatacaacaatacaacgaatacggttacgtggattctcaatatccctgcggatagtgagattaacctttttgtgaatgcaacagtggaaaaattcggcaagctgaacaacacagtgaatgtttttaacaagacggccaacgtgaccgttaatgttcccaacaccgatgtaaccaaggcggtgaacgtcacccgccctagtttcaatgacacgatttgttataccattacagtttttaaccgtaatccgaacgtggatctgatgaatcttgtagttcgtgatgtgttagatgatggtctggtgttcaatggagcttccagtgggggtgtttttgacccgatttcgcgcacgattatttggacgatcaacattacgaaagggggacaggcggtgatttacgttaatgtcactgtgaacaaatatggcatgctggttaacaaagtttttgtggataacaaaactgccaactctactgtttacgtgccgatcgaaccgcctgtcaacccggatatgactgtggtgaaactgagcttgaacaggactgtgtatgtcggtaatcagacggtcttcaccatcgttgtccgtaacacgggggattgcgacttaggtgaggttttcgttgttgagaaagctccagaaggtcttgcgtacagctcctttaaaggcacggactggtcatacagcaatggcaaatttacctatggtaaggtgctgaaagtcaatgagagcgctggctttgagattgtattcgatgcggtgagtccgggtaattggacgaatgtcgtggtggcaggctccaacctcacagataataaaaccggtaataatactacaaaggtgtataagccggatatggcggtcgagaagcttagcttgaatcggaccgtttatgtgggtaaccagacggtatttaccattgtcgtccgtaatacgggggactgtgacctgggcgatgtctttgtggtagaaaaagctcccatgggccttgtttacaactcctttaaaggcaccgactggagctacagcaacggcaaattcacgtacggcaaggtcctgaaagtcaatgagtctgcgagctttgatatcgtatttgatacaatcagtccggggaactggactaatgttgttgttgccggctccaacgtaaccgataacaaaaccgggaataacactaccaaagtctataaacctcccgttaaccccccggttaaacctccagtgaacccgccggtgaatccacataaaatagaaaagccggataacgaaaaagacaagatcatcaaaaaagattcttcaattaacatccgcaaaaccggcaattccatcttcctgatgatgctgtctgtcatcattagcattccgttaatcagacgcaaccagaaa

SEQ ID NO: 76762 - DNA, 507 bp, synthetic construct
  source 1..507: mol_type = other DNA
ttcattggatcatctaacgtgacattaatggcgggcgatagttgcataacactgccatcggactatatgctggacaataaagggattgcgtataagaacgatattgggatcttttttatttcagtatccggtaatagcccgaaagatcagaaagaactctttgacgccatcaaatcgaatggcaaatcatccggctataaaaacgtcacgaaagacaaagttaacggttttaagctgtatgaatacgaagccaatcccgataaacttaagaacgtgagctcggatcgcaaaatcagcggtagttatgaaacttggaaaacctatagtccgtacactccttatgaagatgtgtccgatatggacgtgaccaaattccgttacatcgcttacgttaacgaaaacacggatgatatcagcgaattgtacattttcaccaataatacgaatgtcgacctgtactctggcgagatcaccaagattattgatagcattgcagttgtagaggag

SEQ ID NO: 76763 - DNA, 156 bp, synthetic construct
  source 1..156: mol_type = other DNA
ggttattttggcttgtcagataacgcgctggagtctgattccagtttaaacgaaagccatgacgatgtggtttatctgtggatgctcgatgacaatgacaatctgaaacttattccgacgactgaaacctacagcgaagggagcggcagtaactcg

SEQ ID NO: 76764 - DNA, 957 bp, synthetic construct
  source 1..957: mol_type = other DNA
tatgaaaactatgatgactttgtttttaataacatcaccatagatgactcaggtcatgacgatacgaagctgattgatgaaaaaagcttctattattatgaagaggacagcggttatctgtcggacaatattgttggtggcaagaacatcaagaacacgaccggcgtcgtgatggcggatgatgagtacagttgcggggcggcctcgtttgccaccgtactgaacaacctggggaataatatcaccctttatgaagctaaaatcgcaacgaacacgacgctgaatggcacgacaatgaaaggcataattgatgcgactaaaaaatatgatctcatgggcgtgggcgttaaattagaaaccgtgcagcttaaagaaaactacattgtgaacatgaatattttgggtattactcattggtctgtagtgaaagaaattaacgaggaatttatcattttagcggacagtaatttgggtaattacaagtttgatatcatggaatttaaccagtactacactaatcagacaatcgttattctgaacaaacaacagtacaataatcatatctctattgtaagcaacaacacgaattacattagtaatattgatcaaaaatacatttcggggaatggctatgcattttatgtctccaagtccatgagctatattaacgcaaacccgaaaggttatgccttcaaatataccattatcgtaccgaaatggggaggcaaagtcgtgaaactatcgaccaaaaaactgaccaagcaccgcatcaccgtgaaagtgatatacaagatcaaggtttactccaaatcacacttcaaaggaaaagtcgagacaattcatcagccggccatttttaatctggctcataaagcgggtaccaaattcagcgtcagtcgtcctacatccttcccaatccaaagcatcaaatacactgtttcatattctcacttcccc

SEQ ID NO: 76765 - DNA, 66 bp, synthetic construct
  source 1..66: mol_type = other DNA
ttaagccattatgcggttatggcaccggaaacgactgtgtttacccaacaggccatgctggatgct

SEQ ID NO: 76766 - DNA, 123 bp, synthetic construct
  source 1..123: mol_type = other DNA
gggccgagcctggatatcgccaacttcttcattgaaagtattggcgcgtatatgaatgactttatccgcatgtcctttcgtacggcagcgtcgggtaccgttgctcagcagggctgggtgcaa

SEQ ID NO: 76767 - DNA, 87 bp, synthetic construct
  source 1..87: mol_type = other DNA
gcgatgaacggcacgacccctgggagtccgatcattaaaatgccaattagcaatatgttatttggtatcttcaaccagtatccgctg

SEQ ID NO: 76768 - DNA, 48 bp, synthetic construct
  source 1..48: mol_type = other DNA
gtgggcttgctgaacgaatttgtttataacaaaattatcattaatccg

SEQ ID NO: 76769 - DNA, 429 bp, synthetic construct
  source 1..429: mol_type = other DNA
ttctttagtggtggtgatagcgtgaatgtgacggatgtgggcatgactgtgaattataattacaaaactaacgtggcctttaccattataccaacggacaccattacggaagttaataatgtccagttaaagaacatcgaagtaacgtaccataacggcaaaacacaacatctggaagacgttacctttaactccaaaaacacttatgttaaagataatgagtatgggttcaaatttgattataccatcagcgatgactgcattgacggcctggacgagtatgatttcggacacgcaacacaccacattaaaggggatattgtaatcaacaccgtcggtggaaacgaaaaggtggttggccatattgattatgatgtcccggcgtcggctaccgtatacaaatactctagcggcagtggttcagtcatc

SEQ ID NO: 76770 - DNA, 405 bp, synthetic construct
  source 1..405: mol_type = other DNA
gtggaaacgacaacccacgatttcgacggtttgtttaacatgagtgtgccaagcgatgaggagtttgtaacgctggactcgaatatcacaggcgccagcgtctttggctataattttaactatggggacccgatcggtgataatatcattgtgtattacttcaatgaatccattgtggacgataacgacaccaacatcaccgaatacgtaattaacattctcgacgaaaactctacgttcaaacatccgagcgttgaagatggcttcactgtcttatacaatcagatggttcaacatgatggaggttatatgctgattgcgtcaaatgataacgaaactgaggtggtcggcattgttggggataaccttgatgatctgaaaacctatgcaaatagtatagaattt

SEQ ID NO: 76771 - DNA, 270 bp, synthetic construct
  source 1..270: mol_type = other DNA
gcgtcagaaaacattgatgacagcaaatttagtgaagaaagcgatctggatgaagtggattctgatttggatgaagtcgattcagatctggatgaagttgatagtgacctcgacgatttaaacgacgattccgacctggacgacctgaatgatgacagcgacctggacgagttcgacgatgattctgatcttgatgagttcgatgatgactccgatctagatgaatttgacgacgactcggatttggatgagtttgatgacgattcggat

SEQ ID NO: 76772 - DNA, 255 bp, synthetic construct
  source 1..255: mol_type = other DNA
tacaaccagcggagctctagctattcatccggccacgattatatctttctggataatttagccagcagttcttactccaattatttccgtagtgacttgaaaaacctgaaaatcaaaacgagtaatggtactgaatgccaggtggtctacattccgagctatggatcacaaggcgcagctattctggcgcgcgtatcggttggtcagatttcgcaaaacaccaagctccttctggacgtgcatgatacagggacc

SEQ ID NO: 76773 - DNA, 48 bp, synthetic construct
  source 1..48: mol_type = other DNA
aatgatacctacagtcagtttttcatgaactatagcggcctgtcgtcc

SEQ ID NO: 76774 - DNA, 36 bp, synthetic construct
  source 1..36: mol_type = other DNA
aacgtgtttgttaacgataatgcgacctatcatggc

SEQ ID NO: 76775 - DNA, 66 bp, synthetic construct
  source 1..66: mol_type = other DNA
atgatgcagattgacggcaccctgagtccggatgaaagcaatgttaaagcgacggtgaactattgg

SEQ ID NO: 76776 - DNA, 48 bp, synthetic construct
  source 1..48: mol_type = other DNA
gcgagctcctttgacgcctataatcagggtagtgatgaagagggcaac

SEQ ID NO: 76777 - DNA, 33 bp, synthetic construct
  source 1..33: mol_type = other DNA
atgtatcgcgaaagccagaactgcattgatctg

SEQ ID NO: 76778 - DNA, 117 bp, synthetic construct
  source 1..117: mol_type = other DNA
agctttgaacaagatgaaattacgcatgttgtaaatatgatcgtgccgagtgagtccaacattatggcgcaggcaaactatgtgaaagatgccgacggcgtcacctactgcgaactg

SEQ ID NO: 76779 - DNA, 33 bp, synthetic construct
  source 1..33: mol_type = other DNA
tactggaacggtacccgctatgtggatagcggc

SEQ ID NO: 76780 - DNA, 171 bp, synthetic construct
  source 1..171: mol_type = other DNA
ctggatgaggcgatcaaaaaagggttgctgggcgaagccaaagacattgctccaggtgcaagtcttcaggaattaaacatccgcaaaccggtaaccgacacgataagcattgatactgttggcggtgtgctgaatgtcaacaaggatgtttttgactccgatattgtgtcg

SEQ ID NO: 76781 - DNA, 240 bp, synthetic construct
  source 1..240: mol_type = other DNA
gcgaaccgcattgaatacaatatttatgataccctgattagcagtccgaacgttccacaatataacacgactcaaaccgatgatacgatggacgcttttggtaactttgtcatcaaagcccaggaagcattcaaaggcaatgcgggcgctggggccgacctgacaatcatggcagagtcttacaaaaccttatcatatgtaaaacagcttgcgtactcctcgaataagttggtgcagccg

SEQ ID NO: 76782 - DNA, 51 bp, synthetic construct
  source 1..51: mol_type = other DNA
acccaagcggatggcgggagcctgatcggtgaaaaacagtatattggcttt

SEQ ID NO: 76783 - DNA, 60 bp, synthetic construct
  source 1..60: mol_type = other DNA
agcaaagtgggcattttgctgaacaaaccagggttagcgctgaagggtacctgccgcccg

SEQ ID NO: 76784 - DNA, 144 bp, synthetic construct
  source 1..144: mol_type = other DNA
ctgggcgaagccaaagacattgctccaggcgcgacgcttcaggagctgaacgtccgcaaaccgatttcggaaactatcagtatagataccatcggtggggttttaaacgtgagcgcacaaatgttggattcaaatctgatttcc

SEQ ID NO: 76785 - DNA, 138 bp, synthetic construct
  source 1..138: mol_type = other DNA
cgctctattgaaaaggcggccatcgacatgattatgaatagctcgaaagtggcgacttacaacttcgaaagtggcgatgatacgggtatgaccatcctgaaagctcaggagaaatttaaagaatccgcagggtcatat

SEQ ID NO: 76786 - DNA, 63 bp, synthetic construct
  source 1..63: mol_type = other DNA
gtttcctataaaagtttgacgaccctgaaatcagatattttttcgagcaaccgccaggtggaa

SEQ ID NO: 76787 - DNA, 42 bp, synthetic construct
  source 1..42: mol_type = other DNA
agcgaaatgggtgacaaaacctatattggcatggattacatc

SEQ ID NO: 76788 - DNA, 57 bp, synthetic construct
  source 1..57: mol_type = other DNA
aatagcattgcgtactggctgttacagaacaaaaaaaagtataaaaaacgcgatcat

SEQ ID NO: 76789 - DNA, 36 bp, synthetic construct
  source 1..36: mol_type = other DNA
tgcagcgatattgaaaaaaaagcgaagaaactgggc

SEQ ID NO: 76790 - DNA, 42 bp, synthetic construct
  source 1..42: mol_type = other DNA
gaatacgtggatatggccatccgtaccgaggcgtatattcgc

SEQ ID NO: 76791 - DNA, 39 bp, synthetic construct
  source 1..39: mol_type = other DNA
gccctggcgattatcagtaagatgaaattatatagcaaa

SEQ ID NO: 76792 - DNA, 48 bp, synthetic construct
  source 1..48: mol_type = other DNA
cagaaaaccgacaagaaaacgattaacgatgcgagcctgggtaaaggc

SEQ ID NO: 76793 - DNA, 54 bp, synthetic construct
  source 1..54: mol_type = other DNA
caggtttactatcgcattgcgaaaagcctgggctatgatgtgcaatttgtccat

SEQ ID NO: 76794 - DNA, 57 bp, synthetic construct
  source 1..57: mol_type = other DNA
accacgagcggtaacgtgaaaagtatttggtgcgaagatggctacctgatcgcgtat

SEQ ID NO: 76795 - DNA, 48 bp, synthetic construct
  source 1..48: mol_type = other DNA
aacgcactgttagttgtggccccggattttgcgaaagctcagaatctg

SEQ ID NO: 76796 - DNA, 36 bp, synthetic construct
  source 1..36: mol_type = other DNA
aacccactgatgggtggcgaaatcattagcccggat

SEQ ID NO: 76797 - DNA, 81 bp, synthetic construct
  source 1..81: mol_type = other DNA
ttacgtgattatttcattggtagtatccgcaacagcatgggcaatgactatgtgaacgttattgcgccgtttctgaattac

SEQ ID NO: 76798 - DNA, 648 bp, synthetic construct
  source 1..648: mol_type = other DNA
ggggaatcagtcggcctggaagtcaatgtgaataattactataatgatacgaatctggctgatggttggatttatagcccgaatctggatatgaactttattgatgacgtgaataatctaaccccaacgacccagagtgagcgccaactggtcttagactcgattgcggatttctcaaacaacccggaaattaaactgcattttatcgagaacaacaccatttctaaattctacctgatggatggtgaaccattgaacatcagtgacgaagatggcgtgtggctcgataaaagttttgccgatgcaaaaaatctgaaagtgggcgacaatattacttttgagttcaacggttttaaaatcaaaaaggaaatcaagggaatcggctactcgccggaatatgtatatcacgcaagcacttcctccgtgataccggatttcaacaaaattggtttcgcgtacatgtcttataaggcctttcctacagacaacattccctataacgttttaaacgtaaaatttaccggcagcccggaggaatataataaccttttgtctgacaaacttgatggggagtacaactcattcgttgaacagtcggaacatagcagcgttagccaattttccgaagaaatcaatcagcacaaaatg

SEQ ID NO: 76799 - DNA, 69 bp, synthetic construct
  source 1..69: mol_type = other DNA
ccacagctgttttatccgagcatgagttccacctacaaattaccttcgtggaacccggcgtggtcaatg

SEQ ID NO: 76800 - DNA, 564 bp, synthetic construct
  source 1..564: mol_type = other DNA
atgtatgatggtatgaacgatctgaaagagtgggagtttaatcagataaatcattatgattcaaaactcgtcattgacaacgacgcgtccttatccgaaattgatgatgttgcccgcgacgtggatggggataaaatcatggaaagtgcaattgagattgaatcggactcggctaaaaagagtggcagcctgatagccctgaaccacacggatttgattaccccaaccgattatgactggaacaaaatggaaatcggagacgatgaagttagcattagccaaaaaatggcggacatgttggacatcagtgtgggcgatactgtaaaatggcatatcattggttcggataaatggattaagacaaaaatcgataaaattcatgcagatccgacctctcagggcattgtaatgtctagcgataaactagaaaatcttgatctgaattacactccgacaagcatcgtgacggaacagcacgtggataagaattactccattatcaaaaccgtcaactcaatgaaggacatcacgtctagctgggacgagctgaccgaatcaatgtgg

SEQ ID NO: 76801 - DNA, 54 bp, synthetic construct
  source 1..54: mol_type = other DNA
aaaatgatgtgggattcgtcaggcgacagcttttatatcctgccgtccattagt

SEQ ID NO: 76802 - DNA, 630 bp, synthetic construct
  source 1..630: mol_type = other DNA
gaatattatggactggaacagacgagcgcggatttttataacgaaactaatctggctgacggctggatttacaaaaccagttttgataacgcagatttagataagataaataacctggccatgcagaccgaacggcaacatgtaatttcatctgtgggggaatttgacaatgatcctgacatcacactgcattttgtcgaaaacaacaccatttctaaattccacgttttccagggcaaagatttcgatatcaatgatgagtccggtgtctggttggacaagcgttttgcggattcaaaagagctcaatgtcggcgacaacattacatttaaatttgatgggaaaactatcgaaaaagagattaaaggtatcggctactcgccggagtatgtttacgagtcatcggctacgagcattacgccgaatttcgaagatgtgggtttcgcctacttgtcttataagagctacccagataacgttgaatttaatcgcttactggtgaaatataaccagagcgatgactcgtttaaagaaaagcttgacgattccatcagctatctgtccttcaccaaacaggaagaccacgtaagtgtggcacaattcagtgaggaaatggcgcaacataaaatg

SEQ ID NO: 76803 - DNA, 69 bp, synthetic construct
  source 1..69: mol_type = other DNA
ccaaaaatgttctatcctagtatgacgactcgctacaccctgccgagctggaacccgggctttgatatg

SEQ ID NO: 76804 - DNA, 567 bp, synthetic construct
  source 1..567: mol_type = other DNA
atgaacgacagcatggatgatctaaaaacttgggagtatgatgacattaatcactttgagtccaaactggtgatctcgaacaatgcctctcaggaagaattgtactatgtgattaatggcacgaatggcagtttcatcatgcagatgcctattgaaattaagtcgaacaatcatgaaaacacgggggtcctgctggtttccaacaacaccgacttgatatcgtacacggatagcaacaaaaacccaatcgaaatcaaggaaggggatatttcaatttccaccaaactggcacaggattttaatctgagcattggtgataaaattaaatggcatatcgtcggaaatgatgactgggttaaatcagaaataggtcaaattcacgcggaaccgatcagtcaaggtttaatcatgtctcccgacacattagaagatgaaggcctgaactttacaccgaccagcattctcacttcagagaaattcggcgaaaacatcaatagtattaagtcggtatctacccttgaggacatggaggaaagttggagcgagatgaccagctccgtgatgatg

SEQ ID NO: 76805 - DNA, 54 bp, synthetic construct
  source 1..54: mol_type = other DNA
acgctgatgatggatgccgcgggcgaaagcttgtactatgtgccgatgctgacc

SEQ ID NO: 76806 - DNA, 636 bp, synthetic construct
  source 1..636: mol_type = other DNA
ctgttcatgacgccggacctgtctcatgaaactaagaacatcctggtattggcctcggataaagaggagcagccaaacggtggtgtcgatatggctttcatgatccgcttagaaaacggtagcctcaagaactacacacccatataccctggtgggatgacacacccgactaaatcagcaccgggcggcctgcaaggaccaatgatgctgcacgactgcctctggaatggcctgggtgagggtatgcaaaatgccaaggaaattgtagaagtgcgtaccgggatgcatgcggatgcggtcgtggttgtttatgataaaggtattgacagcattattgattcaatccgcccgcttaaaatcaatgggacggaaaccaacctgagtgcgaccgacatcattcgtcagaacgatgcatacaatggctatcctggcaatgagcatgttcagggaacgatgtcgcggtccgatgcggtgatggtcttggctaaagcactggcgaataccgctaaagatccggtgaaaaaaagtaccatggtgcagaccgccctaaaagaatattccaatggcaacatcattatggaaccgcagggctcttttaccaaattacttgccacgaaaggctttgaaagcattact

SEQ ID NO: 76807 - DNA, 33 bp, synthetic construct
  source 1..33: mol_type = other DNA
gtgagcgggttaggtgcagatgcgctggccggc

SEQ ID NO: 76808 - DNA, 51 bp, synthetic construct
  source 1..51: mol_type = other DNA
atcctgaacgccatgggggcgggtcagaccattggctacgcaacggattat

SEQ ID NO: 76809 - DNA, 36 bp, synthetic construct
  source 1..36: mol_type = other DNA
acgtttgtgggcagtaccgatagcgttgcggtctat

SEQ ID NO: 76810 - DNA, 69 bp, synthetic construct
  source 1..69: mol_type = other DNA
ggcgatatttcctcagtttttgcgagctcggggagttctgtgcgcatcgccgcagaactgaccggtttc

SEQ ID NO: 76811 - DNA, 114 bp, synthetic construct
  source 1..114: mol_type = other DNA
attaatagtaccgacattaccacaaactttagcgcgatgaacctgccaccgtccttcgaacatctgtttggcacggattggttaggtcgcgatatgttcatccgtactttgaaa

SEQ ID NO: 76812 - DNA, 90 bp, synthetic construct
  source 1..90: mol_type = other DNA
acctttctgggcttcgggctggccccacatgaaccggcgattggtattatcttaagcgagagtatgaaatatttggcaacgggcaactgg

SEQ ID NO: 76813 - DNA, 204 bp, synthetic construct
  source 1..204: mol_type = other DNA
atgtcccctataaacccagtgaaaacctatatcagtgccctgggcagcgtttcgtctgaaaaaatcgcaattttggaggcgtactggggtgtgaatgaaccgatcaccacgaaagtaattagctggctgggtaagatcgtgcagggcgattttgggacttcattaattttccgcatgccggtcattgacgttattaaagaacgt

SEQ ID NO: 76814 - DNA, 87 bp, synthetic construct
  source 1..87: mol_type = other DNA
gtctatctgggttggtttccgaccggcttaggggttccaatcggcacgttgagtgagaacgtgagcatttgggaatggctgcatcgc

SEQ ID NO: 76815 - DNA, 69 bp, synthetic construct
  source 1..69: mol_type = other DNA
gaacagatctttacctatccgggcattggtcaagcggccgttagtgcagggctgaaaagcgatgtgcca

SEQ ID NO: 76816 - DNA, 1557 bp, synthetic construct
  source 1..1557: mol_type = other DNA
atgagcggcggcaataccagtacccgcgcagacaatgaactggtagtttctgcttttgtgcacggcagtgagcccgaaaccggttacgacccgatgtatggttggggcgaccgtggcgagccactgattcagtcaactttgatgaagatgaaccgcaatatgacctatgacaatgatctggcgaccagttggtcgtctaataataactttacggaatatacggtcaacatccgcgatggagttaaatttactgacaacacaacactcgatgctgaagatgtggcctttagctataaccaggcaaaatcgacgggaaacacgattgatctgagtagtctggataatgtcagtgcgattaataaaaccactattaaattcaagcttaataaacccgattcgacctttaccgacaaactgttacatgtggggatcgtacctagcgatagctatgacaataatacttatgggagtaacccaataggctctggcccgttcaaacttgcccagtgggataaaggtcagcaggttatcttcgagaaaaacccgaactattatggaaaacagccgaaatttgacaagttgaccatttccttccagaaaaatgaagcgtcatttaatgcggcgaaaaatcatgaactggacattgcggcagtcccgctgtcttacgcaaacgagacgatagatgggtatcactcatttctgtccgaaagcaatgatgtgcgtggcattagcctgccgatgaaaaacaatacaggtgaaacgaatgaggacggcatcgcattaggcaacaatgtgacggccgataaatccatccggttagcactgaactatggtattaaccgagaggacatttgcaaaggtgcgttaaacggtgccggcgtgcctaactacgatggtatcgctcacttcctgccgtggtacaataacgattccactatcaaagatgcggatattgacaaagcgaaagatttcttgaagaagggtggctggaaggacaccgatggtgatggcatcgtcgaaaaagatgggaagaaagcctcgtttaacctatactacagctccgatgctccggaacgccaagcgattgcggtggcggtttcagagcaggccaaggaatttggtattgagatcaacgccaccgggtcgaactgggatgaaatcgataagatcaaatttagcgaaccggttgtgtggggattcggttctaccgatccgtatgtcatgtatggcgaatactatagcaaccaagccggtattggctacaacaacccctcccttgtaaataacagcgctgtggattcacatattgacaaagccatgtcggaaccacgtgaacagagctatgcggactggtctgcagtttcatgggatgggcaaacaggcatttcaccaaaaggtgacgccgcatggctgtggatcagcgaaatcaaatacacctactttgtagatgatagcctcgacatttccaaagatacattcaaactgcaacctcatgggggagacctcttcggcaacatctacgattggacgcgtatatcgccgattaatgctaccaat

SEQ ID NO: 76817 - DNA, 1545 bp, synthetic construct
  source 1..1545: mol_type = other DNA
gggggcccgtcgactgagcgtgcggacaatgagctgatcgtggcggcttacagtcatggtggcgaacccgaagctgggtttgacccaatcctgggatggaactactattctgaacccctgatccagtccacgttgctgaaaatgacccgtggcatggaatatgaaaatgatctggcgaaaagctgggaagcgaacagtgattttaccgaatatacagtcaaaatccgcgacgatgttaaatttacagacaacaccacgttggacgccgaagatgtcgcctttacatacaacgaggcgaaaaaaagtggggcaagcctcgatttatcgagtatggaaaatgccacggcggtggacaagcagaccattaaatttgaacttaaccgaccggattccacgttcgttgataaatttgcctacattggtattgtgccgtcggattcatataacaatgagacctatggtgccaaccccatcggctcagggccgtttaaattcgtacaatgggacaaaggccagcaggtaatcctggagaaaaacccagattactatggcaaggagattaaattcgataaattaacaattctgttcgaacaaaatgaagcggcattcaatgctgctaaaaacaaagaagtagatattgcggcggtgccgttgtcttatgcaaacgaaacggtagatgggtacaatatgcacctcatggataccattgatgtacggggactgtcactaccggtccagaacaataccgggaaattaagcgaagatggaaatccaatcggcaacaacattactgcagacaagtcgatacgcgaggccctgaactatggtgttaatcgcaccgcgatctgcaaaggcgcactgaatgggataggcgtgccaaactatgatggtatcgctcatctgctgccgtgggcgaataatgaatctgccattgatgatggtgacgttgataaagctaaagacatcttgaaaaaaggtggatggaaagatacggatggcgacggcatcgtggaaaaagatggtaagaaggcctccatcaatgtgtattacagcagcaatgcacctgaacgtcaggcgattgccgttactattgctgaggaggccaaggagtttggtattgaagttaatgccactggttcaaactgggatgagatggataaaattaaaaacacggacccggtcgtgtggggctttggtagcaccgacccgagcaccatgtggtccgaatactacagtgaccaagcaacggtcggctataacaatccggcacttattaacaattcggcggtcgacaagcatattgataatgcgatgaagtcggatcgtgaaagcagctatgcagaatggtctgcggtgtcctgggatggtcaaactggtattagccctaagggtgatgccgcatggctctgggttggcgagattaaatacggctatttcgtggatgaaagtctggacatctccaacaacaccgaacttatacagcctcacggcggagatatcttcggcaacatctatgactggtcacgcgtgtctagcattgaaaaa

SEQ ID NO: 76818 - DNA, 1536 bp, synthetic construct
  source 1..1536: mol_type = other DNA
tcgcatgacagtgatccaactcatctgacggtagcggcccacagtaacattaaagaaccggaggcggggtttaatccgctgaccggttgggggtgcggacaccaaaactataatccgttagtgcagagttgcctctttaaaacggataaaaacggcagcattgtcccggatctggctactggttattcagtcagtggggatgggaaaacctggacggttaatgtgcgggatgatgttaaattttcagataactcgacgtttgatgcagaagatgtggcattcaccttcaatacagcaaaacaaacggaaagtgagctggacttaacaaatatcgccaatgttaccgccgtcaataacacatgtgtgaagtttaacctggtggaagcgcgctcaacctttatttatgatttgcgctaccttggaatcgtgccgtctgatagctatgataacagcacctacggagagaaccctatcggtactggcccctatgtcttggaccattgggataaaggccagcaagcgatcttcaagatcaatgacaactattatggcgacaagccgtactttactcaaattaccttactgttcccggaagaagcgacctggttagagctggcgaaatcgggtgaaatagatgtagttcctgttgcgacttctgcactgaatcagaccgtagatggctaccaatttatcgagaaaagcgccggccgagcacagggtgtctctctgccctaccttaacgatacgggcatcatgtataacggtacaatgaaggttggcaacaatgtgactgcggataaatccattcgcgaagctctgaatgtgggtattaatcgtcagacgatgtgcgatgagatctttgcaggccatgcgtcgcctgaatttaccggtgtggatacacgtacctatgcaaatccggacgctaaagtcgctgatggggatgtgagcaaagcaaaacagatcttgaaagatggtggctggacggacaccgatggcgacggcatcgtcgagaaaaacggcttgaaagccagcttcgacctgtattatcctcccgactacctggatcgtcagtcaatgtctaccgtgttcgccgaacaggccaaagaactgggtattgaagttaaacttgtaggtgctgactgggataccatttacaaaaatctatatagctccgccgcgctgatgcaacaaacgtcgccagacccatacaagagcatctatcagcagtatcacagcaaagaaatggacggattctatatgaacccgaacctctacaacaactccgcaagcgaccgcttaatggacgaagctatgcatacgagtgatctgaaccaggcggattccctttggtctcagtcggccctggtgaatggtggtgggtggggcccggcgggcgacgcgccatgggtatggattgccaattacgactacaactacttcattaaggacggcattgatattgggaaacagccggatggtctcggaaatgatgttctgattaacatatgtgattggtcacgtaccaattccacagcg

SEQ ID NO: 76819 - DNA, 204 bp, synthetic construct
  source 1..204: mol_type = other DNA
gatctctccccgatagatcctgtaaacgcgtacctgaagcaagcggcagtgagcgaagctcaacgtcagatccttcaggagtattttgggacgaatgtgccactgaccactaaaatcttccattggctgattgatttgtttcagggtaacctgggcaccagtttaatctatcgcgccccggttgtcgacattattctggaaaaa

SEQ ID NO: 76820 - DNA, 93 bp, synthetic construct
  source 1..93: mol_type = other DNA
gcggtctatctgggctggtttccgattgggtttggtgttccaatcggcgtacgcagcactgatgtgacgttcgcagaatgggccacccgtttg

SEQ ID NO: 76821 - DNA, 72 bp, synthetic construct
  source 1..72: mol_type = other DNA
gaacaggtctttagctatccgggcattggtcaaaccgccgttgcggcagggttacagaacgatgtgccactg

SEQ ID NO: 76822 - DNA, 114 bp, synthetic construct
  source 1..114: mol_type = other DNA
ttcatccgtgatatcccgacgagctttattaacgccaatcaaatgccaagtttagaacatctgtttggtaccgattggatgggccgggacatgttccagcgcactattgcgggg

SEQ ID NO: 76823 - DNA, 90 bp, synthetic construct
  source 1..90: mol_type = other DNA
accttcttggggtttggtctgccgccgcatgagccagcgattggcgtgatcttaagtgaatccatgaactacctgagctcgggctattgg

SEQ ID NO: 76824 - DNA, 63 bp, synthetic construct
  source 1..63: mol_type = other DNA
ccgcatatcctgccggcgtatggccagtacatcattaccccaattgtgacgaacattaatagc

SEQ ID NO: 76825 - DNA, 1203 bp, synthetic construct
  source 1..1203: mol_type = other DNA
agcgagaatctgagcaccagcgataaccctgttgtagtggataatgtggatatgtcatcgaaaaacattggaagcattccggacgtgacgtcggcatccaacgatgttgtagtgtcagaaaattcttcggttgaatggaaatcttatgaaaatgagaaggatgacaatgtcagcgacaatcagtcgaacagcagcagcaactcaacttcaaacggcagttacaaagaagagtcggtggtaagcaatgtggtaaccaagaatgtgtcatccagttatgggaccgttgtgaactataacatcaaagtcctggaccagtttaaaaagccaatggtgggtaagaccgtgagcgtgaccattggtaaaaagaccgtcgagaaaatcactgacagcgacggcatggttaccttcacactcaattgccaagcgggtaaatacgtaatcaaatataaagttgataacatcaacggtagcaactcatatattgtgaagaataagatctcccttacggtcttaaactggaatcttaaaggtgatgtttcgaaaatcaacctgattaaaaagaacatgccgaacaacacgtgggtaaaaaaagcggtcgccgcaactaaaaaaggtattccgctgctcaaatttaagggtggaaaaggcaagattgtgttcatgacggctggcgttcatggcaacgaactgtcctcccaggtggccgcaatgaaaatgattaaatacttgtcggataaccccattagtggcacggtgtacataatgccgtttgtgaatgtcaaagccatcgcgaaaaaagtccggtacaccgataaagattataatcgtatcgcttctagttctggaaccataccaaataaaattgtcaaactggttgtaaaatataaatgcaactcttacggggatttccacactacaaaacctggtggcgcgccggggaaagatattgtaatgggctctaagagtttaaaatccaaaagtgccgacctgacgaactacattgcgaaaaaatgtaaagttaataagcgcatctatagtcacatcggccaagaatacccgggcgcgttgtttgaaaatgttaataagaaagggattactagcgtgatctgtgaagtggctctgccccataatacggtcacaaccaaaacagtcaaaacctcttttaacatgatgaaatatctactgaaatataattccgttatt

SEQ ID NO: 76826 - DNA, 660 bp, synthetic construct
  source 1..660: mol_type = other DNA
gcttatgtgggcaccggtttctcacatgatattccgacgtcaaaatatcatgatttatcagcgagtgatattctgaataaatacaacacgacaaactgtcatgtggaagagaatggtgtctgcacgaaagttgttgacggcgacaccatctatctggataacgggaagaaaatccgttttgtcggagtaaacaccccggagcggggcgtggaaggttacattactagcaaaaattttgtgcagaaactctgcctgaacaagaaagtaggtcttgatatcgatgacagcaaatttactgaccgttatggccgcacgttggccgtggttattgtcgacggaaaaaacgtgaacgaaatgctgctaaaggaaggtctggcagaaattatgtacatgccgcctagtgaatttaacccgtttgagtggggcaccaccaatacccacgtagataccacacacagctcgtcttcgaccacccatacgagtaccgaatccacaagctcttccgattctgcaaaatatattggcaatgccaacactgggaagttccacactgcggggtgtagttcggttaatcatatgtccgagcacaataaagtcttcttcagcagccgcacggatgcgataaatcaaggctacacaccatgtgaaatctgcaacccc

SEQ ID NO: 76827 - DNA, 381 bp, synthetic construct
  source 1..381: mol_type = other DNA
gtgtacgcaaacaatgattcttcaagtaattccaatcgcaccattctgaacgtgagctctgaaggcccaatcgagctgtcgaaaataacggatgacatcaaaaacaattcctattatgagggttatgacgttgaaactctccggtggatggaaagcttaggggataaatatgttttcaaatcgaacgatgaaattgtaattatggataaatgggatgccgacaaaatcccgagcgcttatgtgtgtgacgcgtacttccgcgagatcttcagttgcaacgtcctggagaatcgtacccttggtgatggcaaccattttaaggatgtcttgtttattaagaatgttgaatttattgacgaagaagtgcactacatccagatt

SEQ ID NO: 76828 - DNA, 36 bp, synthetic construct
  source 1..36: mol_type = other DNA
aaactgtttaacccgagcacgattaccactccagat

SEQ ID NO: 76829 - DNA, 2838 bp, synthetic construct
  source 1..2838: mol_type = other DNA
gaatttaacaacgcttctaataccgaagactccaacctgatgaccgataacgtcgatagcctgtcggtcgaaaataaactggaagttagcaacgaggattccatctcagaggcaaatttagttaacagccacgacgacaacctgaacaactattctgatagtgacgttttaagcaactacgaggatgattatggaaacgtgcaagcctccaattacgcggaaataggcaataccaattcggttcgtagcgatgttttatcggttagcaatgatgataatttagcggcgagctctaaagtatctgccaaggttgacgtagtagatacccattactccaaatccgctacatatttcaaagttaccctgaaagatactaaaggtaattctatcagcaatcagaaaatcagctttaaagtgaatggagtgacctacacggcgaccactgataaaaacggtatcgcctcagtgaagactgccgccttgtcggtaggaacatatactgtggcaattaagtacgcgggtagctccaaatatgccgcggtagcgcttagtaagaaagttaaagtcttgagctctgtgagcggaagtgatatcaccaaatactacggcccggtggtccagtatagcgtcaaattctggaagaattacaacgccctggcaaacacgaaagtatcattcaaagttaacgggataacttatacgaagaccaccgataaaaatggcgtcgcgaaactgcccgtgaatctggcgccgggcaaatacgttatcaccaccatcaatccatactcgggtgaaaaactgtcgaataaatgtatctcactgcgcgacggtacaaccttaacccatggtagcaccaacacctacattacgccgaacaaaaaacattcattcaccgtcaccctgaaatctaaacacggtattttaattaaaaacaaaaatgtagtcttcaaatataataacaaaaaggtaactgtgaagactaattcgaatgggaaagctactctgtcgattccggcgctttcgaaaggtacgtactatatcagttatagctactccggcgacaaatactattcaggttccagcggcagcggaaaactgtacgtcaaaaatccaaccacgaaaattacctctagcaagttgaagatgcaatataaggacggtagcaaatttgcggtgaagctaacaaaaaacggtaaagttctcgcgaataaaaaagtgaaactgacattcaatggcaagacgtacacggaaaaaactaattcaaagggtattgcttatctgacggtccctacagtaaaaccagctacgtacaacatcaaatatcagtatctgactccaagttattttaattattgctatggctccaacaagatcgtggtttcgaaacagaccgccaaagtctcagcaggggatctggtgatgaactataaagatggctctgtttacaaagtggttgtcaaaaataaatttggaaacccgcttaaaaatattaaagtcaagtttacaattaacggcaaaacttatacgaagacgaccgatagcaatggagtggctaagcagtcgattggcctcaatatcggctattattcggtgaaaacagtactttcgaataactattacgcacatggcgctatctacaaacacattagcgttaagggcacgaaatttgtaggcggcaatattcatgtagccgtcggtaaaacggcatattattcagtcaagttgctggactataagaataatccgattaaaagtacggaagttacgttcattttggatggtaaaaaatacacagctacaaccagcagcaaaggggtggctaaagtaaaccttggcgtgctgtctgcaggtacgcacaacgttaaatactcccagggcgagtactcaggttcatctaacatatatgttgcggataaagtgaccattaagcaaatcatcgcggcatctggcaacgtgcaaaagtatatccagaaaaaccatcgtctcccttccaccgtgaatatcgggggtgtgacttactccaccaaccagtatttatatctggtttccaaagcgattgtaaatctcaaatctaatgttaaatcggcaatttatgtgaaaaacgtcgatggtcccagtaacccttccagcacctatgcggcaggtaacctgtatgactacctgtcagtcgccaacagcgttgtgaaaaacagcgattcaaaaggcagtgtaccgaacacggttagttctaaagtgggcactattggttataaaagtttagtgtatgcgtttgcccgtgtcgtggccttttacggggacgacgaccgcctgccgtcatttgtcgaaatcaaaagcctaagtggtaccagttcagatagtaacatcaactcgaaaaacactattagcaacctgaaagcctacttggccgcatcaacgaactgccaggttaataatgcgaagattaaacagctcgtgggcaaactgacaaatgggctgaagagtgaaaaatcgaaagcaacggcaatttataactatgtgcgggataccattagctatagtttctattacgacacgaaacacggggccgtgggcacattgaatgctaaatctggcaactgcgtggaccattcccatctgctggcggcgatgtttcgaaccgccggtcttgccacccgctacgtgcacgggagctgtaccttttctagtggcagtacatacgggcatgtgtggacccaagtcttgattgataatacctggaccgtggcggatgcaacgagttcccgcaactcgctcggaaaaatagcgaactggaacacgaagagctatcgtcttaatggctactattccagtctgccgttc

SEQ ID NO: 76830 - DNA, 84 bp, synthetic construct
  source 1..84: mol_type = other DNA
tatattagcaatatcactgagaagacccagacgaatattcaaaacctgttaaaaaccgaacgcgattttctgatcaacaaaatt

SEQ ID NO: 76831 - DNA, 99 bp, synthetic construct
  source 1..99: mol_type = other DNA
atctaccgctcctatatggaaacgagcgatgtcagtttaaaagcgaaagatgacatcattgatgttcggaataccattctggacaaccgtactcatgtg

SEQ ID NO: 76832 - DNA, 78 bp, synthetic construct
  source 1..78: mol_type = other DNA
ccgctgtatgggctggcgccaggcgctattgatagctttgcgcagttacgcgccgtgatggcaggcagtttcggttcc

SEQ ID NO: 76833 - DNA, 96 bp, synthetic construct
  source 1..96: mol_type = other DNA
ggtactttcagcatcttgaacggcagtgatggactgctggcgggtattattccgaaatttatccagttagccaccggcgggacgtttgacttctcc

SEQ ID NO: 76834 - DNA, 105 bp, synthetic construct
  source 1..105: mol_type = other DNA
caaaaaatcggggtgccgattttgggccatcttcagaatggcaaagcggttgatggtatcgcctggctgctgagcactccaaacttaaccatgtttattacggaa

SEQ ID NO: 76835 - DNA, 84 bp, synthetic construct
  source 1..84: mol_type = other DNA
atgtttgatatcatgggtatgatctatggcgtgttgaataccattttcgatccgattctggcgatggacccgaacccaagcaac

SEQ ID NO: 76836 - DNA, 123 bp, synthetic construct
  source 1..123: mol_type = other DNA
agtgcgatccacgatctggtaattatattgccgaccacagtctattgggttacgttaactccactgtggcatgtgattggcagcatgttttacggtggccaggccaccatcccgtatgggatt

SEQ ID NO: 76837 - DNA, 666 bp, synthetic construct
  source 1..666: mol_type = other DNA
gcggacgatgatcgcagctattcaatcgaccaagtgatcaccgatttaacagttaagaataatggcctgctccatgtagaggaacagtatgattattcattcgatggggcgttcaacggcgtttaccgggacatccctctaaaatccggcgaaagcattgagaatattaaaattcatgttgatggtgcctatgccacgtatgaagaaagcgatgatgatggatataaacacgtcaagatttatctgtactccgatgcagcccacacgaaaggtataaaggattgcaatgtaaaagtctacatcagctacgacttgattggtgcggtgactatctttaacgatgtgagtggccttcagtacaaactgtggggtgaagaatgggatgtgggggctaacaatttaaaggcaaccgtgcacctgcccggaaacaacgggaatgaatattatctgaccccgtctgagtacaatgacacgagttcgcttaaaggcaacacaattactgcggaaagttcgtacattccgaaaggcgaatactatgagttgctggtgctgatgccagttgatgactttaataaatctccgaacgctaaacatgtcaatcagaacggtcatgacatgatcatgaaaaacctgaaaaacaccattaacgaacgtgacttttggaat

SEQ ID NO: 76838 - DNA, 54 bp, synthetic construct
  source 1..54: mol_type = other DNA
atcgagaacaaaatcagcattggccatccgaatattaaaggttttgaagcgagt

SEQ ID NO: 76839 - DNA, 255 bp, synthetic construct
  source 1..255: mol_type = other DNA
tcgcaggaaaatattgagagcaacaccaaagacctcatgctgacattgaataacaaggccggcctgagtgcgagcgaacagatcgttttcgatactctgaaccatttttcgaccaataacattctgaacctttccacgctgaatgggcaattatcttccgagacgaatggcaaatggtttatggaaaaaatccgggagtgggaaagctcagtggaaaacgatatggatgtcagtcgcttctttgatgaccgtggt

SEQ ID NO: 76840 - DNA, 174 bp, synthetic construct
  source 1..174: mol_type = other DNA
gtgccgaacatcagtgattacgataatgatggtctgttcatgtatcattattacggggggtatggcatgatgaatatggcattttcaaccggtgaaatttccgccaacccaagcgactctagtggtttcggtggcagcggcggcggatcggggggaggcggtggcggcgcgttt

SEQ ID NO: 76841 - DNA, 327 bp, synthetic construct
  source 1..327: mol_type = other DNA
tatatcccgggccgtgaattggatctacctattgtgaaaaacgcagagctgattgcaacgaaaatcaaaaaaatactgcaggtgaatgaggatgatgacaccacagtcaatctcattaatggtggtcagcagctgttagttcaactgccattcgaacggttaaacgtagccgccgattacagtgtgtctacgctgcagactagcgcggcgaccattcaatccatcattgacagctttgaaattaacatgtttgatgcttcgaccatcaagactgcggtcatgggcgcttatccgcgcaccgttgaccttagcgggtcaaacatcagt

SEQ ID NO: 76842 - DNA, 60 bp, synthetic construct
  source 1..60: mol_type = other DNA
ctgggttatggcttacgcaacattatggccaatcatgttgtggcgatcaccaacaaacag

SEQ ID NO: 76843 - DNA, 159 bp, synthetic construct
  source 1..159: mol_type = other DNA
gccctgagcagtattatggagcagacggcgatgtttgaaacaggtgatgccaccggggcttttgaacgcatgcatttattgactctggcgtatcaaggcctgaatgcaaataaccttgtcttcgacatcgttaaagaaaacggtaaaggaaccgtgggc

SEQ ID NO: 76844 - DNA, 75 bp, synthetic construct
  source 1..75: mol_type = other DNA
gcgattgaagacaagatcattaaagtggccaaaaaaatgccgagcggctacaacatgtatgagccaatcgattgg

SEQ ID NO: 76845 - DNA, 78 bp, synthetic construct
  source 1..78: mol_type = other DNA
agcacggttctgtactacaacgacatgttagagtatgaaaccggcctgccgggcgtggattatggtcgcactgaaggg

SEQ ID NO: 76846 - DNA, 87 bp, synthetic construct
  source 1..87: mol_type = other DNA
agtcatagcatttatggtggtggcggaccagggacttttcacggcaaccacgtggttacccgccatgcgaaaggcacggccatcccg

SEQ ID NO: 76847 - DNA, 135 bp, synthetic construct
  source 1..135: mol_type = other DNA
ttagatgctggtactcagatgtttagcgtgcaacgcaccagtgcgctgatcggcacggtttatggcaccattgacaacctgcgtaacccgatcccaaatgtcgccaaaattgcaggggaaattaaagataagttg

SEQ ID NO: 76848 - DNA, 870 bp, synthetic construct
  source 1..870: mol_type = other DNA
ctcctgggtggcggtagtgacaacgtcacgatagggtacctgccgagcgaccatgatgcggcgctgttcgtcgctgacgcccaggggcaatatgcgaaaaacggaattaacaccaaactggtacaatttaacaatggcggggatttgatgaccgcgatggccagcggggaagtggatgtgggttatgttggaatcacaccggtgttatctagcattgaaaaaggcgtgcctgtaaaagttatttcagcagcacagactgagggttccggcattgtggttgcgaaaaactcaggaatcaatagcgtatttgacctggagggcaaaaagatcgcgacaccaggcgaagcctcgattcagcacatgttgctgcagtattacctgaaacagaacggtatcgacattaaggatgtcaaagtaagcgccatgaaagtgccctccatgaatgacgctctgaaaaccaataatattgatggtatgatcacctttgagccctatgtctcaattgcggagaaaaacggtgcaaaggtcctggttgactcctcggaaatcctgccgaaccatccgtgttgcgtcgtggtggcgtctgacaaattccttgatgaacatccgaacgaaacccagaagattttagatattcacaaaaatgcaacggattatataaataataacactgatgaggctgccgaattactgcctagtgatattgttagtgatgtggatgttgaaaaacaagcccttgcaggctttccattcatctctggcctgaatgatacgtacaaacagaatgtaatggaatttatgaacctcgaagtggaattgggcgttcttaagaaaccgctatcggaagataaaatcttctggaacggtagc

SEQ ID NO: 76849 - DNA, 897 bp, synthetic construct
  source 1..897: mol_type = other DNA
ggtcttttcgactttctgggcgggggcgatgacactgtgaagataggttacctgccgagcgaccacgatgcggcactatttgtcgcggacgctaaaggtatgtataaggataataacattacaacagaactggtgcagttcaacaacggtggggatctgatgacggcgatggcgagtggggaagttgatgtgggttatgttggaattaccccggttttgtcctcaattgaaaagaatgtcccggtaaaagtgattagctctgctcagactgaaggatcaggcatcgtggtaaccgatgacagcggaattaaatcgccggcggacctcaaaggcaaaacgatcgcaacgccgggtgaagcatcgatccagcatgctcttctggtgtattacttaaatcaaagcgacttaaccgttgatgacctgaacgtgtctgccatgaaggttccgtcgatgaatgatgcgctgaaaaccggccaaattgatggtattgttacctttcagccctatgtgtccatcgctgccaatcagagtaatgcgcacattctggaaaattcaagtgaaatcttgcccaaccatccatgttgcgtcgttgtcgcgtctgatgattttatcaaaaaccatgaggaccaggcaaaaacgatcgtcaaaatccacgaaaacgccactaagttcatcaacgacaacgtgaaagccggcaacgcagataaaattgtaaaactcttacctgaggatattgtatccgacgccaatttggaggcggattcgctggcgagcttcccatttattagcggcattgataacgatttcaaagccgatgtggatgaatttcaagccctggaagtcagtattggccttctgaataataccatccctcaggataaaatatactgggaggca

SEQ ID NO: 76850 - DNA, 2550 bp, synthetic construct
  source 1..2550: mol_type = other DNA
gaaaattcgtccgcggatttgattagcgacacgcagtatgagaacagtgtggatattgatgttgcggacgataatctgaagtcgtatcagagtgtctcgtctgacctggaggataataatgaggtatataacctgaaattaaatgataattctcaggtggataacacctttttaaaggacaacgcttctgtatctgattcgaagatctataaattaggttatgatgttacccatgttgcggacaaattgcttaatttctcatcggcggatgacatcctggtaattaccacggccggtatggcgtggattgacaataagaccacggaaagcgcactgggcgggattgtcgatgcgtcaaataactacgtgagttacggcaaaggcaatatattgaccctgtcgtccacacgtaacgacccgacgaacattgcatttttcattaaaaaagacaactcactcaccatggccttctataagaacggatctctgacccctattttccatggcaacgcggggccaaccctgagcgcgggtgaatggaaaaaactccagaaggcgctgggtgatgaagatgcctattcctacatcagtatagcgaatgcatggtccgccggcatgccgaatgatgtgttaacgcaagctacctaccacggccatgtttgcacggggcttatcagcggtcaggctatgattcaaaccctgctgacttactatccgccgaaagacgaatttggtttgcccttagagcataccgcctattatgtccttggagttccgggcggttcggaggacgatgcatttacctggtcactggacatcactccaggcaagcgcgcgtacatcggtatcgataccatggtaaataaggccatgacgggattcatccgatggaacaccacgtccaatacgggcattattattatcatgagctataatgagacggccatcaaagaaagctttaaaaaagtttctggtctgaacccggatgcgagcgcaactaatgacttgaaataccagaactggctgattagcaccttacatacaaacccgacaagccttgtcacaatcctgtacgaatttaaaggcctcaccaaagataaccttgaatatttgatgggactggagattgggaagggcaatgtggttaaaagcgcgcatggtctcgatatgaactatattctgggcctgaacctgaccaaagccaatcgtgaagcgaatgtgaacattgctgaaataaaactgagcgatgctaaactgaaacagatcgggattgatgcttgtaacaatgcaatcgaatactttagtagccagggtatcaccattagcaaagacctgaataatctgtacgtgttgacttctgcgggatatgtgcgcattaatggtacgcctacttccatggtctttgacggtatttacgaagtgttgggttccgccctatacaaaaaaaccctgttcccagttcacacgcctatatggaaagacctggtgtttgatttttattgggtcgatccaaacaacgttaccaacgattcgagctttagtttgaagtatgacgttgctaaagatgaactaattgttatcggcaacaccacgcgcaatgccaactacattctgcaaaacgctatcaagtatgaccctccgtatgatgtactgattggatggttattccacaaccacgtgtgcggtggcagtgcaccagggtacttaattgcggattatatctatgaaaacttccccacgaatgaaaacgagtcatatatctacctcaccactaatgcgaactgtaaggatgatgtgattagccgcgtgctgggggtatcaccgggtatggggacatactataacctgcgttatgataacaataaaaccaacagcaccaatgtcggtattgcaattaaatggaacagcaaaaccaaaacaggcgagctcattatcatcaatcttgacaactggggtagcggggccatcttcaaaaaaggctcgaacatgtacgaggaatacatcaaactatataaaaaagattattcctcgccgaatctcatttcaagaccgcaaatttcaatcacagcgcggaaagaaattaatgaagagatgctgaacaagattattggcggcgccacggatactaaagaaggcaattcgatcgcatatattatgaatctgccggacaaacttcccattaacaatggcgaaaacaacaacaaaaaagacaataaaaaaacaaaaatcacgggcaacaaaaagaaaacggatggcaagcacataaataacagcagttcctcttcaaattctattgattctaacagtcctacaactggcacttacggcaaatccaacgccggtctgtccgtcggaatctccaaaaatatcataaatgcaaatagtaactctgaaagttcagatgaaagctcgggtgatggaaaaacttatgaaataagcaaaaagagtccgaacaaaaaaatcaactcaaacaatgccatttttgcaatcttagcagtgctggtcctgggcgggatcgtgggctacggttacattcgtaaaaatcgcggt

SEQ ID NO: 76851 - DNA, 369 bp, synthetic construct
  source 1..369: mol_type = other DNA
catccggggcatggccactatgtagacgagattacgtctgaagacgttggccatagtaaccacccatcatcggattcacatgatagttccggtaaagaattgagctcgaaaagttcatcaaacagccgcattgcctcttctcatagcaattcgaaaagcaacaaggtgagcagttcggacacctccaactcggatttaagcaacaaacacacgtcctcccaaagcattaaaagttccaaaggtgatgtggagcctatcaattctcagaatgaggaaatgccgaacaatacgcaggtcaagaatactagcaatatcaccaaccacacaataactgaagaagcggaaaataccaacctgctgacccagagc

SEQ ID NO: 76852 - DNA, 36 bp, synthetic construct
  source 1..36: mol_type = other DNA
ctgccgcagttggcgaatgaatttaacctgaataac

SEQ ID NO: 76853 - DNA, 54 bp, synthetic construct
  source 1..54: mol_type = other DNA
attatgggcaacgtgccaatcattccggaatattttagtttactgaccaaaagc

SEQ ID NO: 76854 - DNA, 384 bp, synthetic construct
  source 1..384: mol_type = other DNA
actgcgaatatcttgattaatgacaacactccgctcgagaatcaagcgggaaccctaaaaatcaacaacaaaaccatccattacgaaaaatccggcaaatgtctggaagtcattgatggcaataccataaaagtgtacggcatcggtaaagttcagcttacgcaggtgggttcaccaagtagcgaagctaaagactttgttgaaaataactgcctgggcaagacggtatatctggatattgatgataaaaaggtagaagatgagtatggtcgcgcactggccattgtgtataccgacacggtggacgtcaataaagaactgattaacaacaacttatctgagatctcgtacttcacaccgagcgaatttaaaaagggggatatt

SEQ ID NO: 76855 - DNA, 60 bp, synthetic construct
  source 1..60: mol_type = other DNA
tactatgggggcaacccgacgtatctgtggaaagtgtttattggtgaaccaagcatcacc

SEQ ID NO: 76856 - DNA, 36 bp, synthetic construct
  source 1..36: mol_type = other DNA
tacattaacagcaccgcgatccatagtatttatcag

SEQ ID NO: 76857 - DNA, 93 bp, synthetic construct
  source 1..93: mol_type = other DNA
tcgttctttaaaggttggggcgccgatccgaacacctattttgcgactaccttactgcagagcagtgactccatgaatgggctgttcacgttt

SEQ ID NO: 76858 - DNA, 72 bp, synthetic construct
  source 1..72: mol_type = other DNA
accctgccaggcagtagcattggtctggcggagttgttcaacccggattggtcccttttaacgcattttgaa

SEQ ID NO: 76859 - DNA, 111 bp, synthetic construct
  source 1..111: mol_type = other DNA
ttagggtatatgagcctgcaaagtggcaccgcagttgccgaccttgtcacgcagggcaccggtctggtattcattgcgtacccgactgtgtttaacgtgttgggtgattgg

SEQ ID NO: 76860 - DNA, 306 bp, synthetic construct
  source 1..306: mol_type = other DNA
gcgattgcctacacttctatgcatgatgacaccagtgacaacaacaataccacgattaaaagctgcatcccgaacattacaaacgcaacaaacgatgctcctaatgcgacgggtgacgataagaataccacttcctccgagccgtatgttgtatcggaagtggttaaatttaatgcccagcagggcgaagggtattaccgcgaagtcacctacagtgatggaaatttccgtcaatatgatgtggatacgggcaaattaatcggtagctcatatgattcggaccaggataaactgccaagcatggag

SEQ ID NO: 76861 - DNA, 1821 bp, synthetic construct
  source 1..1821: mol_type = other DNA
acggatacaaactctacggatgacgtaatttcgagtgatgaggaggcggaaccgccatcggtggtctcgcaggacatatcgataaacgaaggaaacgactccaacccgcaagagaattatacgttgaagggcagcgatgtgagtatgtattataactcaggatcgggctacgaagcaagtttatctgatggcaacgattcggtggaaaacgcaaccattaacctaaacattaatggggtcgactacaacaaaagcacggacgccagtgggaaagtttttctgatcataaacctgaaaccgggcgattacgtaatcaccgcgagctacggtaatctgactaccgaaaataagattaacgtgttgccggtgatcacgggaaatgatgttagcacaacgtataaacatagtgtcccgtatagcgctacgtttctcaaaagtgatggcagcccactgtccaacacctatgtcaaatttaaactgaatggcaaaacctattccaagaaaaccaattctaaaggaatcgcaaaattatatgtcggctcaaaaatcggcacgtataatatttatgcaatgcacccgaatggatacagcattagtaataaaatcaccgtaaaaaatagtatcatatcaagcaacctgaaaaaacattatcgcagctcaaaaacttttaaagccaccttttacggtaaaaatggtaaactgttgacgggcaagaccattaaattctacactaaaggctcgtacttctacaaaaaaaccaattccaaaggtgtggcgtacattaaagtgatttccaaacctggaacctacaagattacttccatcaacacaaacaccggtgagaagaaatccaataccattacggtgctttcaaccctggaagcgaaaagcatgacagtgttcaccggcaccacgtcaaaatttaaagtgaaactttataaaggtgaaaacattgcgaaaaacactaaaatgaccgtttatgtggacggtgttaaaaaacgagtaactacaaacagcaatggtgttgccaccgttaagttcaaactggataaagggatctataacatcaaatcggtggacccgtttacaggctatgttctgaataaaaaagtaacggtaaaactggcgtctatcagtgctattaacgtcaatgcaattgagggcaaggaagggttattccctgccaagctcttgcaacagaatggtaaggtggctagtggtacttacatggagatgaccattgacggcgtgaaacacaaagtcaaaacggatagccggggtattgccggctacaagttcacatttaaggatgctggtgtgcatactgtagtttgtaaagatttatctaccggctataaggtgaccaaaaagatcaatgttgtaaaaaagggtgaaggtaaatcttatgaccagtttggtgtttcagaagatggcaaaacaatgcttgtgattggccgtccctctgcgtcgggtgaaacagcgaagtacgggtatacctattacaaaacggaagtggaccgcacctgtccgatctgcgggagcaatgaactctactggagcatcttttgggcgtccgggaatactgatggcggcactttccccgaaacccctagccgtccggcccattatgatgagggcaacctggatggcatcattatttgcatgcattacacgggggatgatgagtactgcgatgccgactggtctgttttcgggcacaaccacgacggtagcggtcgtgatctgaagcttgtctccaaaccagtccgctcatcagaaatcgaagcatatctgctgaaaagcggatattatgttaaagtc

SEQ ID NO: 76862 - DNA, 45 bp, synthetic construct
  source 1..45: mol_type = other DNA
atgattacccagtttagcactacgtacgcgaccggcctgtataac

SEQ ID NO: 76863 - DNA, 45 bp, synthetic construct
  source 1..45: mol_type = other DNA
tatcagattattgcaatctacggcgcggagtatatcgaagccggt

SEQ ID NO: 76864 - DNA, 441 bp, synthetic construct
  source 1..441: mol_type = other DNA
gtaagcccggttttgatcgtggctgaggacgcgtctgaagacaacggtattgatatggctgcgacgattggcttaaccggttttaactggatttatccgggtaactcggttaacgctcaaggccagacgctgcataatgtgtatgccgactatcctgataatccgtatggtgcggcccgcgacatcatgagttatacataccatgtcaccccgcacatcataatttccattaacaatgatgcagcagcggccatattcggtgaaaacatcatcgatgatattcgtgccaatgatgggtacaacggctacgcaggcaatgataaagtgtcaggaagtatggatcggggagacgcggtaggcactgcgatggcagagaatggcattaatatcattgaaattccaatccagttcctgatcgggaacattagcccccactttgtc

SEQ ID NO: 76865 - DNA, 102 bp, synthetic construct
  source 1..102: mol_type = other DNA
cagtttgcattcgccgatctgagctttgcgggcttaatcggtatcccaaaaactttgttcatggaagggattggcgtgggtagtctgaccggaacgattccg

SEQ ID NO: 76866 - DNA, 42 bp, synthetic construct
  source 1..42: mol_type = other DNA
tggggtggcggctggctgatgaacattggggcgatcgatttt

SEQ ID NO: 76867 - DNA, 51 bp, synthetic construct
  source 1..51: mol_type = other DNA
gccgcgccaagcattaacggtgtggcaggcctgttttatgggaatccggaa

SEQ ID NO: 76868 - DNA, 57 bp, synthetic construct
  source 1..57: mol_type = other DNA
ttagtgagccagagtatcaatccggcgaacgtcggcattggtgttctggggggcctg

SEQ ID NO: 76869 - DNA, 63 bp, synthetic construct
  source 1..63: mol_type = other DNA
ctgggggctcaggcggtgacgatcggcggattaggtgcaaccgccccgggcctgggtattggc

SEQ ID NO: 76870 - DNA, 36 bp, synthetic construct
  source 1..36: mol_type = other DNA
tacaaatatatgttaaatgcgctgcacaactttcat

SEQ ID NO: 76871 - DNA, 42 bp, synthetic construct
  source 1..42: mol_type = other DNA
aaactgattgcgacgatcattggtaccggcgatgccttaccg

SEQ ID NO: 76872 - DNA, 36 bp, synthetic construct
  source 1..36: mol_type = other DNA
aaactgccatcggtgaccggcagttgcagccatccg

SEQ ID NO: 76873 - DNA, 126 bp, synthetic construct
  source 1..126: mol_type = other DNA
tataacggtcatggggaggatgacggatacttcggcggcgcagatgatgctgccggcgaagcgattgaggaaagcggttttgaaccgtggttttcctcgatctgggaaccaccgagtggtgaaatt

SEQ ID NO: 76874 - DNA, 66 bp, synthetic construct
  source 1..66: mol_type = other DNA
ggcaaaggggacgttatttatgaaactggcatcctgggtattgtcgtgacgaccgatagctggcat

SEQ ID NO: 76875 - DNA, 51 bp, synthetic construct
  source 1..51: mol_type = other DNA
ccgcatgcgagcactaccttcgccaaactgtttggcattacgcgcggtttg

SEQ ID NO: 76876 - DNA, 33 bp, synthetic construct
  source 1..33: mol_type = other DNA
ccacgcctgtttgcgccggaaagcgtggatgcc

SEQ ID NO: 76877 - DNA, 339 bp, synthetic construct
  source 1..339: mol_type = other DNA
atttataacaatacgcagccgtcgcatgaagatagcttaaatctgatcacggacaatggcactgtgcacaagaccgcgtcttacccatacaaagcagtgattgagtacgaaggtagctggggtgcgaaaatgggagatccgaactatctcgtcagtgaagatggttatggcactaaatcatttgtccttgattgcgccgcttgggaccgtgtaagtatctccgcacaaaaatatgactacggcgaaggggagttgcatgttaaactgctgcgcaacggcgaggtggtagccgaaaatagcaccacaaacgttaccggggcggtggtcgttaattataac

SEQ ID NO: 76878 - DNA, 786 bp, synthetic construct
  source 1..786: mol_type = other DNA
acggactcgaatgtcgtcatcacctatggggagactacctatagcaatagcaattataagtcttttgttgacaacttctttgttaaccaggcgaatgtggacataaacaacgtaggcgttaaaacaatcactgcggatcaggtgaatcaggtgtcaagcgggatcacgggtaagtcgtataattcaaaccaaatactgtcgtctgccctggttgacttgaacgataatggaaatctgaaggtaagtgttgataaatccaaaattacgaccattaccggtgatatgtacatcagcgcgttaaaatcggcgggaattaccagtgggcatgtgtatgtgacaagtccagtgcaggcaacgggtgaatctgcgcttgcaggtatcatgaacagttatgaggaagtcacggacgttcaaattccggactctgtcaaagaagccgccaacgatgaaatttacacccaggctgaaatcgtgaataacagcggtgtaaatgctgatgatttatccaatctggtgaatcaggtgaaagacgaagtaagcggcggcaatgttaccaaccatgatgagattgttaatattattaacagccacgtggaaaacaataacatcaacatcaccaataatgatattgagaacctggcagattcaattgaacaagtacagaacgtgcaaggtgatgtcaactactacaaaacgcaggtcaacgaatttctcgacgataactccacaggcggcttctcactggatggcttgtttgactggatcaaatccttcactgatggcatt

SEQ ID NO: 76879 - DNA, 93 bp, synthetic construct
  source 1..93: mol_type = other DNA
ggtgtgatttcgatcctgagctcgattgcgccgtttggcagctccaactccatcagtcaaaccagcacgtcaagttatgcccagtctgttgat

SEQ ID NO: 76880 - DNA, 378 bp, synthetic construct
  source 1..378: mol_type = other DNA
agcagtccagatcctatcaaattaggggacatcaaaaatgatgacttggtgattaccgaagtcggtcagaataaactgaacttcgaatattccgttgaggtggacatctctgatttgtcgtccgaggataaaaaattatttgaaaaagccctaaacaacaacaataccagcttcattcttaatctgacttcgtcaaccccgacgaagattgcaatcacgatgcatagtctgccgaaaaaggctgaaattataggcaacacactgtacattaaaaacaacaatatgtttcgcctgattaacggtatccaactcgataatctgaagatctctgcggtaagcttcaataccacttcaggccagctgtttattgcgcgtaaa

SEQ ID NO: 76881 - DNA, 354 bp, synthetic construct
  source 1..354: mol_type = other DNA
gccttgtatcagatcaacgcggaaaattccgtaattgtcgggaacttaagccaaaatataactaatgatggctacggctactataatggttatgtgacgggcgacattaaagtagattctagttttgattatctgtgcgtgaacgtgaactttcttgacaacaacggtaaggtcattgattcaactatcggttggaatgatctgaacccgcagagtggaaaaacctacaaaatttctgcttggtacttcgaacagcaagcgccagagaaagcagaaatcagcgtggttgactcggccgattcaaccacgccgctgtataccgagaatatcaccatttcgacatccagcggcgtt

SEQ ID NO: 76882 - DNA, 339 bp, synthetic construct
  source 1..339: mol_type = other DNA
tgtgtttgcgcctctatgaccggacaaatctcaatcctgccgaatgataatgaaagcgagagcattttggataatctgtcggctattacaaacgataccggtaacagcggccagagttacggttctaaagattattcgtcaagcagctcgagtagttctagtaatgatgattcccaagtggaaacgaccactgaccactcaggtgataatcagggggactcccagaaggattccgatgaccatgaccacgaaaatagcaaccagaacaacaaagacaaagacacgaaaactgattcgggccatgcaggccagggctccggggatgcgaacgactttgat

SEQ ID NO: 76883 - DNA, 51 bp, synthetic construct
  source 1..51: mol_type = other DNA
agttgggcgaacccgctggtgcagacccatagctatttctactttaatacg

SEQ ID NO: 76884 - DNA, 51 bp, synthetic construct
  source 1..51: mol_type = other DNA
gcgaaagattatgttgccaacaccattccgttcgtgccatttcgcatcagc

SEQ ID NO: 76885 - DNA, 63 bp, synthetic construct
  source 1..63: mol_type = other DNA
ttctatccgaacgccgaaagcatggcgcataaattatttggcctgattcagatcaatgatttt

SEQ ID NO: 76886 - DNA, 42 bp, synthetic construct
  source 1..42: mol_type = other DNA
atggttgagctgaaagacattgcgcaggaaaacgaagtggat

SEQ ID NO: 76887 - DNA, 36 bp, synthetic construct
  source 1..36: mol_type = other DNA
agtaacgcgaaaattcgtcagcgcagcgacgatacc

SEQ ID NO: 76888 - DNA, 69 bp, synthetic construct
  source 1..69: mol_type = other DNA
acgtttagcattactccggaacagaccctgaaattcgaagaatatttcaataaatttgcgaacggcgag

SEQ ID NO: 76889 - DNA, 42 bp, synthetic construct
  source 1..42: mol_type = other DNA
gcgcagaaagccattgtggaaccggacgatagctattttgca

SEQ ID NO: 76890 - DNA, 39 bp, synthetic construct
  source 1..39: mol_type = other DNA
ggcctgagcggggcgatgttaggtgtggatgccggcggt

SEQ ID NO: 76891 - DNA, 87 bp, synthetic construct
  source 1..87: mol_type = other DNA
aaatttattgatgcagttatcaagtattccaaactgtacccatcggcgagtaacgtgttccatctgagccagttaccggccaatgac

SEQ ID NO: 76892 - DNA, 102 bp, synthetic construct
  source 1..102: mol_type = other DNA
cacccgatttttttacttggcgagctgatgaatatcaacgtggaactgttctacttgttcaaccatgcgttccagaatccattttttgattatattatgccg

SEQ ID NO: 76893 - DNA, 87 bp, synthetic construct
  source 1..87: mol_type = other DNA
attcatgagccgcgcccgttccttagcttggataacgtgcatctgttaatcgcggaagacgatccactgagttttccttccggccac

SEQ ID NO: 76894 - DNA, 33 bp, synthetic construct
  source 1..33: mol_type = other DNA
gtggccagcctgggcgaagcagcgattagtggt

SEQ ID NO: 76895 - DNA, 57 bp, synthetic construct
  source 1..57: mol_type = other DNA
ctgatcggtattttatttggccaaattgaagtggacgtttggcagaacgcggataaa

SEQ ID NO: 76896 - DNA, 33 bp, synthetic construct
  source 1..33: mol_type = other DNA
agcacgtttggcaccatggcgattgcagccaac

SEQ ID NO: 76897 - DNA, 51 bp, synthetic construct
  source 1..51: mol_type = other DNA
ttgaacatttataatctgagcgccaaaacggcagcgatgaccagtgaaatg

SEQ ID NO: 76898 - DNA, 48 bp, synthetic construct
  source 1..48: mol_type = other DNA
ctgaacatcaacttcttgaatatttttccacagctgagcgtgtatccg

SEQ ID NO: 76899 - DNA, 36 bp, synthetic construct
  source 1..36: mol_type = other DNA
atgatgttgatcattaaaaacatctttctggtgatt

SEQ ID NO: 76900 - DNA, 339 bp, synthetic construct
  source 1..339: mol_type = other DNA
ccgctggcggaaaattcaatccgcaatactcttgacgtttccgattctctgaacgtgaaatcagatttgtcgaaaatcgctaatgcaattaagcaagtatacggcgaaggtcagggtagccgtcagaccattaaaatcgaaagcaacaagaaactcaaaattaacatagccaacagtcacgttagcacgagttttaaactgaaaagcaattccaaaaaggatattaaagagcatgtaatgtcgaacattgggaaaacgaccatcagtttaaacaagggcgaaaatgtgatcattgtggagtggccagtcaattctaaaaacatgctgatttatacagtc

SEQ ID NO: 76901 - DNA, 519 bp, synthetic construct
  source 1..519: mol_type = other DNA
ctcgatccgatttatgatgaactgcccaatgtagccagtgtgattgagaagaatatgccaaataacgaagaaacgctgtacctggacttaagctcttcaattaatatcgacgacttgaaaaacaacctgagcgcaaccgatggctttatctcattcgatgaaaaatcggttaacattcctatgtggaccttcaacgagcgcgaacataactactttgatgaaatagtgggtaatatcgattcgaactataaagcgtataacatcagtacatccgagatccagataacgcttgcggataattacactagcgcccaggctctgaaatcctttagcgattggtacaaactggtttatggcgaaactatttcttatgcgcaagtccacgcagtcttggtggttgattccagttcgctagacacgttcgagcatattttacttcaaaaaggtattgtggctagcaagatcgaagggccgattcaggacaccgtaaacaatacaaattcatctatgctgaccaac

SEQ ID NO: 76902 - DNA, 36 bp, synthetic construct
  source 1..36: mol_type = other DNA
ctgcagaaaaatttatacatcattggcaactatacc

SEQ ID NO: 76903 - DNA, 636 bp, synthetic construct
  source 1..636: mol_type = other DNA
atcgttagctcgatgatgaacacgccagacaatgtttacaatattaccaacgtcgggcacaacgcaaatggtacggtctataaaatcgaggccggcaacatgtcgtctaatgaaaccgtgggtctgattttaggcgtccacccgcgcgaacatgaaatccacgaagcggtgaataataccatttataatatcacgtctgaaaacggcactaacaatcttacgaaaaaatatgtaatctattatattaaaacaaaagataacttaacctcccgtgaagatacccgccctgcgggtgaagagttggctaacaagttcatcgtgccaaatatcgtgaaggataagccctttatcgtattggacgtacatgagataaacccggattatgaatactcaaactttatatttagtctctccaaccggaccaacacagttgacagctacattagccatattgctaacgatgtgaatctggtggattaccagttcagcgaaggcacaagcccggaaaaagtcaccaaaccgattgcctccaaaggagttacgaccctactgatggagacttcaattactgatgcgctgatggagaaacaaaaaacggcagacaatctgattaaaagtctggatagtctggaaccg

SEQ ID NO: 76904 - DNA, 594 bp, synthetic construct
  source 1..594: mol_type = other DNA
acgggattcataggcggtaacgatgtcgaaacgacgccctttaaaatgagtttcatggaagggagttttatcggtaatgtaagcctggaaaacgataaagagaaattcatgcactcttatgaggataaagaaaacaaaatcacttataatatttccaccgtggacaactcgtccgtgctgatggaaatctaccaaattcagggtctgggtaatccggaggtgcgcagtttcaatggcaacgagtggaatatctactttacacaggcggttccgaacaataattcaagcaccaactcttcgaacggggatgacgccatgaacattattattggcgaatcacagggtaagaaacaagggtatctcatctacatgattatcgatggcaaatccaaaatcaatgccaccggtaaaatgtatggcgaagcatacacaaattattttgaacctctgctggagagcttaactttgaaagaaagcaagaacgttccacatatttatgacgaatttggcttaaccaaggaacagtttgattatcagattgacctaatacgtcagtacaaaagcggaaacacctcggctcttcagggcgcgcaa

SEQ ID NO: 76905 - DNA, 1101 bp, synthetic construct
  source 1..1101: mol_type = other DNA
gcaacgaacgcgccttataccgcccagtccgttgcagatgagtataaccttccgatcggccaatccatgtttgaaaaccaatcgattttaggccagcaggattcaatctcggtaccattgatcagcaatgttggcttcctgcagcatcagattaccgcactggacattcaaggattactgatgacgctgaccactggtatggtgccctttgattttagcaccgtatctagtgaaggtatagactcatacggggatgtggttaatgtcgaaggcccaggctttcttacatttgaaggggataaattggcggtcaaaagcccgaacaactatgtctgggggtacagtactccgtataaatggctcgttaaaacggatacgggtgtggatgtggtggaaaatggcacggtggttaaaagcgttcccgaaaacgaaatcaagaatttagattatcataacgattactataatagttctactatccgtagctggtataactatgatgcgcacaatgggtcgacattcaccctggaaaagggaatgaaaggcttcagtgacggccggaacaatattagtgctgcggacgtgcccgtaatattcggtcatgatgttgttgactatgcctcggaatatccgactggttctccgattctgctgtactcgggcaactacacggaggaagatggggaagcgtacggcacgtctctgggatcacacgccgagtacggtgattccatccgtgaagtaaatgcccgtcagtttgtggatgcctggaatggcaccgtgatcccgcctaactcaaccagcagcggcaaagattatgtgtactttgagtccgctgtcgatccaaccgcgccgggaggaagcgcagcgcatggtgtctgtccgcctgcgcgcgctctacgcgccgccgtcaccgctgaaggtttcggtctgccggtgggtatgacctgggacgaagacgcggtgctctttgggtacaacccggcacaggacattacagttacaaataatcacgactatccagtactgattaagatgtggactgagggtgagggtaccggcatgggcatctactgccaaattgtccgctatattccgaaa

SEQ ID NO: 76906 - DNA, 39 bp, synthetic construct
  source 1..39: mol_type = other DNA
gtgctgtttagtagccaggcggaatttacccatccgttc

SEQ ID NO: 76907 - DNA, 297 bp, synthetic construct
  source 1..297: mol_type = other DNA
cgtgtctctggcatgaccattttctcgccactgttacggttaggtcgcatcgaacagtactcactgtccagtattaaaatggttttgaacaacatccagctgatcgggcataatgccaatgctagctattggggagcagatggcaccgcgtttgcggagggttatatcactttgcccatgcagctgattctgttttttgggctgccgttccctctcttctttggtgtgctagtaaaccaaaaagatacgattgattacatgcttccgggtatatttggctggggcttcgactttggc

SEQ ID NO: 76908 - DNA, 33 bp, synthetic construct
  source 1..33: mol_type = other DNA
tttccgacgaacatggattatctgaccagccca

SEQ ID NO: 76909 - DNA, 60 bp, synthetic construct
  source 1..60: mol_type = other DNA
tttattggctttacctatgataacctggtccaggcgagcgttcaagtgggtttcccgtgg

SEQ ID NO: 76910 - DNA, 36 bp, synthetic construct
  source 1..36: mol_type = other DNA
gcgtttaacttcagtcatgtgttttatattgaaagc

SEQ ID NO: 76911 - DNA, 315 bp, synthetic construct
  source 1..315: mol_type = other DNA
ttctattccagctcacttattaacagtagtatcaacattgaagactcggtctcgcatcgcatcatcctcaacgatgtgtcttgcgtaattagccaggtgaatagtaatggcgttggttatagcaagtacattaagctgccatcggataaaggttactttgagattaccgttgataaatccaaactgaccattgaatatgataataagaaaggcgaaacgatgctgccgctgttgaacatggacagcaaatacaaattaatcagcgggcgtggatattatatttcaaaatctgacgatggcaaaatcgtgataact

SEQ ID NO: 76912 - DNA, 414 bp, synthetic construct
  source 1..414: mol_type = other DNA
gtgtttatcagtgacgaaaacgaactgaatattgcgatggctgcggcacacagcggtgtaatagaaggcctggcgacatcaagcagcggtatttaccctgcggatgcttacagtgattattcaaattctaaaatgaatgtcttggaaccatattcggtcgagattgtgaacatttcgtacactgagctgggcggagataacaactatgataaaaagcaaatccagtttaaagtttacgcaaaaacctctgaccgcttcaacaataaagaactcacgtccattggggaccggatcaattataacttacgtaagtccattgccgttagtttcaatagcatcaacgccaccaataaactttataacccggtgttttccccgcattatgtgtacacgaccgccaatgttaaatgggta

SEQ ID NO: 76913 - DNA, 2658 bp, synthetic construct
  source 1..2658: mol_type = other DNA
gagaactcgacggatattaatctggaactcaatcataacaacgatgagtgcattaaggaaatctctgatgagagttcaacagacattgatttaaaaatcaattacgaatatggggatgaaatcaatccggaaatttccatatctcattgcaataataacatgaactataccaaaaatatcattcactcaaacaattaccgcattaccatgaacaaactgaacgacggcgccgagtgttctgtgagcgtttcagcgctcgggtacataacgcagatccaaaatatcaccatcaactcccagagcaacaaaacgactatcttcaatctaaaagccacggatatttacaaaatgggatatgatatgaccaaatcggcagatcgtctgcttaattttagcagcgctgatgacgttctggttattaccactgcgggcatgacccgcattaatgacatcacgacagaaaacgccttggatggcatctacaacgcggcggatggccacatcacgtatggcaaaggtaaccttctgacactccatgccattcgaacagatccgaccaactttgccttttttattaaaaaaggaaacaggttgaccatggcattctaccaaaacgcctcgacaaccccagtatatacgggaattggaggggtgggtctgactaccaatcagtggaaaaaattaaagggcctgataggggcggacgacgcgtatacctatgtcagcatcgctaatgcatggaacgcggggctgtacagcgatattctgacactggcctcgtatcatggacacgtctgtactggtctgattagcggtcaggcgatggtgactacgttaatcaaatattacccgccgcgtggtgaaacgggcgcccagcctcttgagaacaccgcttattatgtgctgggcgttccgggtggttcagacgacgatgcatttacctggacccttgatattactcagggcaaaatgtcatacattgggttcgacaccatggagaataaaaacatgaacggtttcattcgctggaatagcagcagcaacaccggacttctcattataatgtcttacgatgaagcaaaaataaaaaatacattcaagagtttatacccaaacattaacccagacaatagtgtgactgaagacctgatctatcaaaattggctgatctcaacgttgatgagcaaccctgaatcattagtcaccattgaagccgcctacaaagatcttacattggaacaaaaaaatcagttaataggcaaccaactgtggagcgcgtcgaatattactgctcggggcctggatttggactacatcaacagtctgaatctgccagatgccgaaatggaaaccggcatcttcaataatgtccacctgtcggattcacagttaaaacagattggggtggatgcttcgctgaaagctgtagattactttaaaaacatcaatgtgacgatagaaaaagacatgtctaacttttacgttctgactggggcgggctttgtccgtattaatgatactgccacatctatggtatttgatggtattgaggacattttcggtgcgcgcctcagtcgcggtaacctactcccggtgcataccgcactgtggaaagatttgatcatcgagttttattggttgaacacgtcggatatctataatagcgtgacctatagcctaaaatataattcaacaacgggtcagctgtatgaatgcagccagcaatataatatccaggaccgtagcctccgctacgacccgccttatgatgctctgatgggctggctgttccataatcacgtttgtacgggtagttctcccggcgtcctgttggcggataaaatttttgatgacctgccgttaggtgaaaatgaaagctacgttctggtgagcacctacacgtattgcaaggacgatatgctgtcccgattgcttggcgtgagcccgggtatgggtaattattataacctggcgtattccaacagtgatgtaaatgcaggcgcactgtggacggcggattcggatatcattatccggtggaatagcgagaccaataccggaacggcgaccattattaagtttggttatccgatctttaaggatggtgcggatgaatatgcggaatggatgcgttttgtaaaaggcgattactcttcggagaacattgtctcgctgccgactttaagcttcgaggtgacgaaacccatcacccgcgatgattataacaagatcatctccggcaaatccgatgacgaaggcattaacgtattaagctatatccgtgcgctgccagataaaattcctgccgtgctcattgacaacaatggcatttctaacggaaacgacggtaattccatcaacaaataccccaaaaagtctaataacaatagtgcaaacaccaacagtattttttcatcgtcaaataattacaactccccgagcaagggcctgaacccgaacgttggggtttcgtcctattctctttcaggcgacagtgacgtggaagacaaaggcgaagccagtagtaacggcaaatcctatgaagtctccaagacccctgcaaccaaatccattgattctaacagtctgatttacgcactggttggtgtgttggctattgggattctgatcggtctgggtttcatgaagcgtagaaaa

SEQ ID NO: 76914 - DNA, 69 bp, synthetic construct
  source 1..69: mol_type = other DNA
atgccgggcgtgttggagagcaaaaccctgatgaactttttacagatcaaagaaatgctgtatcatatt

SEQ ID NO: 76915 - DNA, 3969 bp, synthetic construct
  source 1..3969: mol_type = other DNA
gaagagagtatggataacaccacatcaaatgatgatgtgctaacctcagatagccatgatgacgtcctaacgctgaacagtaatgatgatattctgacctcgagcgaaaaaacctggtacgtcggcaaaaacacgaccgttggcggcagcggaacacaggaagacccgtttaataatattgaattggcgctgaatcatagcagcagtaacgatacaatatatattaatccgggcgtttatgatggtccgcataatactaatttaaaaattgatattgataatctaacgatcaaagccaaacccaattccgtattactgaatgccaatatcaataacacacgcgtgtttgaggtgaccgggaacgatgttagcattagcggtctgaacttctccaacgtgtacatggaatatggtggtgtgatcaaatgggatgggaacggaggatcattaacggattccacgattaaaaattccaagtcccgtgtcggttcgatccgttgggaaggcaataatgccatcattaacaacataaccattctcaattctacttccgaaaacgggattcttgtcatatcagggacgtcgtccaatatcacaaactccactatcagagataccaaagggtattatggcgccgttatgtttggtggtaaattcaatatcattgataactgcacttttatcaacaacacggcatggatgaacggcggcggagtgtatgattggggcgcgaataacactgtaagcaattctttatttatcgctaacaatggcacacgtggtggagccatcctgacttatgaaaaccagccaaatcgcatgaacatcatcaacaacacgtttattaacaatatcggtggccaagcaggtgccattgtagtacgtcgagcaggcgcaaacattgataactgcacgtttatcaacaatagcgccggatcggccggcgcggtcctcatcctgtcggaagcgaatatcaccaattccattttcgagaataacagtgcttcgaccgttgggggtgcggtatatattacaggtgacggttccaccattgacaattcgatctttattaacaataccgccaataacgatggcggtgcaatttactggagcggtgaaaacgggaccgtgaccaatacaattttcattaataacaccgtaaataatgggacgggggaagcgattgggtatattaacaatgttacgctgaacaatgttaccctggtaaacaataacatcgaacaagtaatcgtcaacgaatcaacaccaacatttgaatacgtgtttaaacttactgaaggatacagcaatgtcaaactcaccgataactataccgccttctgtaccgaaaagacaaaatggtccagcagtccgcggacacccctgatcccgcataatgatctgtccatactgaaaaaccacataaccggtgaatcagtagcggagtatttgaaaattctgatatacaaatatctgaaagatccagaccgcatccgcaatctgcagcagaaaatctggatcttcacggatgacaattatatcgatagtacggactctatcatcaaagaagtgatttctgattataattctgggttccgtattcctaaccagggattttctgaaattatcaatgataccaccgtactgcgtattgattttaaatcatataatatcacgaaacaaatccaaaacatgatcggctttaaaagcagtattgaaaatattacgtacaacatgagtgtggttaaaaatacactgacgcccgcggtgattctcggtaaccaaaccacttttgaaatcaaagtcacgaacaccggtagctactatttgacgaatgtgagcgtcattgaagacggctatgatggtctgatctacaacagctttagcgaccctagcggcaaatggatattttcgcggaatagtgatggaaaaccgatgtggacatacaacggcacgctgtacgtggggattagctatagctttaacgtaacattcaataccaccaaaacgggtaacttcaccaattttgtagtggtcacatctaacgaaaccgacaacaaaaccaccaacaataccacgaaggtgtataagccggacatgaccgttgagaagctttcgttgaatcggactgtgtatgtaggcaatcagacggtctttactattgtggtccgtaacaccggggattgtgacttaggcgatgtctttgttgtggaaaaagcgcccgaaggccttgtttacaactcatttaaaggcaccgactggtcgtacaacaacggcaaatttacgtacggcaaagttctgaaagtcaatgagtctgtgagttttgagattgtattcgacgctgtgagtcctgggaattggaccaatgttgttgttgcgggttcgaacgaaactgataacaaaacagggaacaatacgacgaaagtttataagccggacatgacggttgaaaagctttctttgaatcgcacggtctatgtgggcaaccagaccgtctttacgattgtggttcgcaacaccggtgattgcgatttaggtgaggtgttcgtagtggaaaaagctccggaaggacttgtttacaactcatttaaaggcacagactggtcatatgatggcaataaattcatgtacggtaaaaccctgaaggttggcgagtcggctagctttgacatagtatttgacacaatcagtccaggtaactggactaacgtggtggtggccggttccaatgtaaccgacaacaaaaccggcaataatacgacgaaggtttacaagccggatatgaccgttgagaagctttctttgaatcgcaccgtgtacgtgggcaaccagacggtcttcactattgttgtccgtaatacgggcgattgtgatctgggcgaggttttcatcgtggaaaaagctccagaaggactggtttacaactcatttaaaggcacagactggagctatgatggcaataaattcacctatgcgaaggttctgaaagtcaatgagtcggtcagctttgagattgtattcgatgcggtcagtcctggtaattggaccaatgtcgtcgttgcaggttccaacgaaactgacaacaaaaccggcaataatactacgaaagtgtacaagccggacatgaccgttgagaagctgtcgttgaatcgaacggtgtatgtgggtaaccagactgtctttactattgtagttcgcaatacgggtgactgcgatctgggtgaagttttcattgtggaaaaagcgccagaaggactcgtgtacaactcatttaaaggcaccgactggtcatatgacggcaacaaattcacctatgcgaaggtgttgaaagtcaacgagtctgtgagttttgagattgtattcgatgctgtcagcccgggcaattggaccaacgtcgtggtggcagggagcaacctgaccggtaataagactggtaacaacaccaccaaggtttacaacccggggctgaaggttgaaaaaatcaccttggacccggtcgtgtctgttggtgagattacatcttttgagattgtggtccgtaatactggcgattgtaaactgggggatgtgtttgtgcacgaagatagttatgaaggcttaaggttccatagcttccgcggcgatatgtggaaacagaaaggtgacacgttctactatcagggtgtgctgaatccgggcgagtcagtgagctttgtaattttattcactactctgaaacctggaaacttcactaacattgtgaccgcgggctccaacgttaccaacaatacaactacggaaaacaaaaccaaagtaatcgaaaaccacactaacaacaacacgaacggtaccaataaaaccgtgaataacgaaaccaaagaggttaacgtgcacaaggtggatacgtcgcgtgcaaccggcaacccgctgctcgcattactcatggttctgctgatgattagtgtgacttctgtgcgcaaattcaaaaaa

SEQ ID NO: 76916 - DNA, 720 bp, synthetic construct
  source 1..720: mol_type = other DNA
gcatactccctttttactcagaaccaagtccaataccagaccatcgcggttagcaacgccacgaccatggaagtgccggtgtctaaaaattcaacttttttcaatgacgcgctggggatcaaatactatcaggatgacaaaagcggcgttcaggtgattagctggaacggccaggaacaagccagcgcgaaaggtgcagtcaatattgcctcgcaatttgagaaacagaaggccggcacgacacagtccattgagaacggggtgccggtgtatgaaaacaaaaaactgcgttgctttataattgaagttaaaaatgcgacaaccaatgacaacattatcatcgttgccaaggataagaacgtggctctgcacatgttgaaaagcatcaaattcggcgtaagcaacattaccaatgcggctcaggtcgaaccttacgctgaatcgggtggaaaccatttaaatgataataatgacacggtcttcgtattctatccatggtacgtatacgatgagggtgattatgatgcgtatgatgactactcttcacgcgatagcgaatacgcagatgacagttattacgactattcttccagtgattcggaatatgcggatgacagttattatgactattcttcaagcgattcagaatacgcagatgacagttatgatgaggaatatgatgagtccgatgaagattatgaaagttcggaggattttaac

SEQ ID NO: 76917 - DNA, 273 bp, synthetic construct
  source 1..273: mol_type = other DNA
gcgattgattctgcgaattggacttcggctgatgtagggtatgaaacctttaaaatcccacctcagtatgaaaacccgtacagcagtgacttcgacatgtacgagttcgatgaggacattgatgtgtttacaatccgttacgttaacccgaatctgatggatctgtatggtcactttttaaatgaataccatggcaaaaaggtcaatgttgcaggccatgatgccgtgcacttcacgtattatgatcgccatgacaaaaccaacaactccgtg

SEQ ID NO: 76918 - DNA, 147 bp, synthetic construct
  source 1..147: mol_type = other DNA
tggttttcggcgggtgaagaattttattatatcaattggattggcagcaatatcacgccggccattaaggaagttgtgaaatcttccctgaaatcaaactacacccataaagagttctacagtatcttaaacgataacataaaaatt

SEQ ID NO: 76919 - DNA, 270 bp, synthetic construct
  source 1..270: mol_type = other DNA
gcgtatacaatgtttaacggcaacactcatctgaacgttaccgacaacaccacgggaatcgacaacagcaccggcattgataataatacgacggttgtcggggataattcgccattagagaacctgaccaacaataatacaacctataaagtatacaatccgcagagtgattcctatgtcccggtgatcggtgaaaaattcgacgaagaagtgaaccgctggtatacttatgatgatcaaggtgtgcgttactacaatacgcggattaat

SEQ ID NO: 76920 - DNA, 36 bp, synthetic construct
  source 1..36: mol_type = other DNA
ccaaaaattctgaacccggatgcgacgagctatacc

SEQ ID NO: 76921 - DNA, 75 bp, synthetic construct
  source 1..75: mol_type = other DNA
aagaacattagcactagtttaaacaaaacacagaataaaaccctgatcaataacgaaacctataaaaaaacgacg

SEQ ID NO: 76922 - DNA, 60 bp, synthetic construct
  source 1..60: mol_type = other DNA
aacgtgcagggcgccaccagttacatcaaggttattaaaagcactacgaaagtctatgcg

SEQ ID NO: 76923 - DNA, 51 bp, synthetic construct
  source 1..51: mol_type = other DNA
agcaagtacaacatttatagtatcaaaaccaattcgaaaggcctggcgacg

SEQ ID NO: 76924 - DNA, 51 bp, synthetic construct
  source 1..51: mol_type = other DNA
agcaaaattttaatcaaaaaaacgattccgaaaaagatcgaaactctgacc

SEQ ID NO: 76925 - DNA, 162 bp, synthetic construct
  source 1..162: mol_type = other DNA
acgattaaactgaccgacgattataatgatattgtgaaaaaagttagcatcaaagtcaatatctacaccggcaaaaaatttaaaacgttcaaaattactaccaataacaacggtgtagcgaagctgaagacagataagcttagtttggggactcataactta

SEQ ID NO: 76926 - DNA, 207 bp, synthetic construct
  source 1..207: mol_type = other DNA
ataacacttgtaaaaaccattatccatgatgatattaaaacgttagtgctgaaaaacattacttactaccaaaccaaggacgggaaattcaacgcgaaactgggttggtattctaaagttggcagttcatatcagattttgcgcaagacgaatgaaaattataacatcatctcgaccgtcaaaagcaattccagctttactaccttt

SEQ ID NO: 76927 - DNA, 120 bp, synthetic construct
  source 1..120: mol_type = other DNA
aatctgaaagctgaaatcacctggaacaaagttgagggcgcaacgaagtatattatattccgtaaaattgggcgcgatgccaattttaaagcgatcggtattgtgaacagcaacgtctta

SEQ ID NO: 76928 - DNA, 45 bp, synthetic construct
  source 1..45: mol_type = other DNA
ccgaaacagctgcgcagcattttaaatagtaacacctttgtggat

SEQ ID NO: 76929 - DNA, 48 bp, synthetic construct
  source 1..48: mol_type = other DNA
agcctgaaagacaatgaaattaaatggggcaaggtgccgaacgcggat

SEQ ID NO: 76930 - DNA, 36 bp, synthetic construct
  source 1..36: mol_type = other DNA
accatcacgctgaaattaaataacattgaaaacagc

SEQ ID NO: 76931 - DNA, 282 bp, synthetic construct
  source 1..282: mol_type = other DNA
agcccgtacaaaagtaattcaaacaaacacatcttttcgattccctatcgcgtgggcgaattactgggctgcgtttactataatccgagcattccaggctccacttaccatgatttggggcaaaaagatggtaagaacatcgagaacaccaaatattatcgctatcgtatttgtcgggaggtcgtagaccagatctctatcggtgaactgcctggaaattggaaggaactggataaccttaaaaatagtgaaggtataaccaacacgtacattgatgactat

SEQ ID NO: 76932 - DNA, 303 bp, synthetic construct
  source 1..303: mol_type = other DNA
tatctagacaatagtatactgggctcgatcaattctgtggacactcatacgttcaacggggctctgaatcacattcttaataaaatcgaaactgcgagcaaaacccgtgttgaacgcggtgagtccccgattaaggtgatttttgtcgatctgtgctattcagatcgcgcatacgataaaacaatcaaagaaaaccgggatgtaaccaaaaataaaattggcctcaccttgaatgactatcaaaacgccttaaataaacagtacaacaagtggaaaaacaacaactttctgacgctgtacaac

SEQ ID NO: 76933 - DNA, 60 bp, synthetic construct
  source 1..60: mol_type = other DNA
aaaacccgcgactacaatattgtgaatcaggaaaactgcccgtatacgactagcgataac

SEQ ID NO: 76934 - DNA, 54 bp, synthetic construct
  source 1..54: mol_type = other DNA
agcaaattcacctacggccagtatggtaacgcctttgcgagttttctgaaagaa

SEQ ID NO: 76935 - DNA, 321 bp, synthetic construct
  source 1..321: mol_type = other DNA
gcatacatctcgctgaacacacaagagaccaaagtagacataattactcagaacaccatccacaatggcgatattattaccgttcagctgaaagatctgtaccgcaacggtatcccgaatcaggcgattgatttgaaaattctggatgacagcggttgggcgcataactataacgccacgaccgatgaactggggatcggtcaaatccagattctcggccttgaaaatggcaactatacggctcacgcaaaattcaatggaactctatttttaaaggagagtgccaatcatgtctcctttgaagtgacggacggctatttc

SEQ ID NO: 76936 - DNA, 60 bp, synthetic construct
  source 1..60: mol_type = other DNA
ttcgaaggccaggtggcgaccgttgccaattttattaaaatgtattttgatagcaacttc

SEQ ID NO: 76937 - DNA, 54 bp, synthetic construct
  source 1..54: mol_type = other DNA
tacacgattaccatgtgcatcttaaaaaacaagctgctgtattataaatacgaa

SEQ ID NO: 76938 - DNA, 39 bp, synthetic construct
  source 1..39: mol_type = other DNA
ctgaaatacgaatataaaattttattcacctttaacccg

SEQ ID NO: 76939 - DNA, 744 bp, synthetic construct
  source 1..744: mol_type = other DNA
ggtctctttgattttatgggtggcagcgatagctcaaatgacgataatacgttcgtcgtggggtttgatgcagagtttccgccatatggctataaagacgatagtggaaattataccggtttcgacctggatctggcaaaagaagtgtgcgaacgcaacaactggacattcaaagcccagcccattgactgggatgcgaaagacgtagagctggattctggtagcattgactgcatctggaatggctttactatggatggacgtgaagacaactatacgtggagcaacccttactttgacaacaaacagataattgtggttaagtcgaacagcggcatcaatacgccggcggatttgaaaggtaaaatagttgaaacacagaaagattcctcagctttagcggcgcttcagggcgataataaaacgttagcggatacttttggcaccctgaccgaggtagcggattacaatacggccttcatggacctggaatccggggcttgtgatgcaattgctatggatattggcgttgcggaatacgatattaaaaataaaaacgccaccagtgattaccaaatcttgaaagaatcgattaccagtgaaaagtatggtattggattcaaacagggcaacactgatctgaaggacaaggtccaatctaccctagacgatatgtttaaagacggtaccgtggccaaaatcgcacagaagtatgggatctcggaggatgccctgatccaaccg

SEQ ID NO: 76940 - DNA, 36 bp, synthetic construct
  source 1..36: mol_type = other DNA
atgatcttaagcaacgtgattggccagctgctgggt

SEQ ID NO: 76941 - DNA, 33 bp, synthetic construct
  source 1..33: mol_type = other DNA
gtgtttggcatgagtctgagcgcggattatcgc

SEQ ID NO: 76942 - DNA, 57 bp, synthetic construct
  source 1..57: mol_type = other DNA
attgctatcccggaaatgtttaccgtggccaaacagattgcggcggcagatgccagc

SEQ ID NO: 76943 - DNA, 42 bp, synthetic construct
  source 1..42: mol_type = other DNA
ttgtttaacttcaatgttggcaacctggtgccgctgaccgat

SEQ ID NO: 76944 - DNA, 33 bp, synthetic construct
  source 1..33: mol_type = other DNA
gtggcgggtttaggcgcagatgctctggcggcc

SEQ ID NO: 76945 - DNA, 57 bp, synthetic construct
  source 1..57: mol_type = other DNA
gtgccgatcctgcagtttatgggtgccggcgataccattcaatatgcgatggactac

SEQ ID NO: 76946 - DNA, 36 bp, synthetic construct
  source 1..36: mol_type = other DNA
gttctggctgcaggcacgaccgcggtcgccgtgtat

SEQ ID NO: 76947 - DNA, 63 bp, synthetic construct
  source 1..63: mol_type = other DNA
ccgattgcgaccattttttcgtatactgctgccagtgcaagcctgtccccacagatcgcgacg

SEQ ID NO: 76948 - DNA, 447 bp, synthetic construct
  source 1..447: mol_type = other DNA
tacatcggttttggaaaccataatgatgatgggcaaacacaagtgcaaaacaacgcgtcatccagtccgaatcccgtgcagtcaacccagtcaagccagcctcagcagtccagtagtgcacagtcggcagcgatggatattctgggcggtagcttttccacgggcagcagcctgtctgccaaaacctatgccagcatctatgttggttcacaacactccggtgagaaggtaataattcagattaaatactctcgcgacggctctagtctgaataatgggaatatggtcccaaagactgttgactcgtctggctacattaacgtgaaatcggcggatagcttcaaatattatccggatttcgctgaaatcaacttgtttgacactaataaaaaccttttagatacccagagcgtctccctcagtccggacagctcgacgcagaccttc

SEQ ID NO: 76949 - DNA, 378 bp, synthetic construct
  source 1..378: mol_type = other DNA
ctgaacggcttaaataatagtatacatgttggggactcctattttagcctgccggaaggctacgtggaaggcaatatcgtcaaatataacgatgtgaatatcaccaacggtacgacctcacttcgcattattgaatacaacgacaacaacattcaggagcatatcgataaatatgtgaactacagcactaatcacaattatagtaccaaaattaacaattttaacgttgatggtatgaacgtgtataaatctgaaattatccaaaacaataagaccttccactattggtttattaaaaaggataaagtctacgagatcgtaacatgggatggaaacagctacacggacaatactgtattcaatttgattaaatcgaat

SEQ ID NO: 76950 - DNA, 117 bp, synthetic construct
  source 1..117: mol_type = other DNA
ttctatccaatggacattatcccggaaccctaccaccagtatatgatcttaaaccctattttttggattatagatcagtttcgccatatgacgctgtggcaaagcatgccgagtacc

SEQ ID NO: 76951 - DNA, 69 bp, synthetic construct
  source 1..69: mol_type = other DNA
acgggtatgatcccggcggatgcaattactaactatcaacagttaattgccggcaatatgaccctgcca

SEQ ID NO: 76952 - DNA, 33 bp, synthetic construct
  source 1..33: mol_type = other DNA
ctgcagattatttttcgcacgaccgcgatcggc

SEQ ID NO: 76953 - DNA, 42 bp, synthetic construct
  source 1..42: mol_type = other DNA
gacgataaatttctgaaggaaagctacaaagagtattatagt

SEQ ID NO: 76954 - DNA, 168 bp, synthetic construct
  source 1..168: mol_type = other DNA
aatttcaacaatgcgattggcattagttgtagcgacgtttatatttacttaataaattccctttactatactggggaaaaagtaaacatcaccaacttcatccatatctctccggtggtctgctttttgacgtcgctgttttttcgcgtgggtttcgttgataaactg

SEQ ID NO: 76955 - DNA, 177 bp, synthetic construct
  source 1..177: mol_type = other DNA
atgggtaacggccgctttgatgccgcttcgcagatggcgaacggtgttaaagggaccaatggcgaactgaccgacccagcatacaatccggattcaagttattatttcatgaactatatcaattacatttctaatagccatacggtgtttgagattaaccctactttatactccccg

SEQ ID NO: 76956 - DNA, 291 bp, synthetic construct
  source 1..291: mol_type = other DNA
ttcaccgcgacagtcgagcccacggataaatatatgtcgccggaagaaatttccaattacattatcgatagcaacccggattatgaaaatatgaccattggcgtatacaacatccgcccatacagctggtgggttggttctaacaccattggaatcccgtcatcccatcaaagtgaaattgagcagagcaacatcagttattacatcgtgaataagcctatggacaacctgacgaactttactgaaataaaaaatattaacgagttatatctgtataaaaataataatttt

SEQ ID NO: 76957 - DNA, 168 bp, synthetic construct
  source 1..168: mol_type = other DNA
aactttaataatgccatcggtatttcctgtagcgatgtgtatgtgtaccttttaaatgcactgtattacaccggcactaacgtacattcaatcgacaacattttcttgagtccggttgtctgctttctcacgtcgctgttcttccgcgcggggtttgttgataaactg

SEQ ID NO: 76958 - DNA, 183 bp, synthetic construct
  source 1..183: mol_type = other DNA
ggcatgggtaacgggcaattcgaagcgggcagccagatcgccaatggtgtgaaaggaacaaatggcgaactgactgaccccgcatacaatccagatattagttattatttgacgaacttcccgaactttatttcgaactcccataccatctttgaatcaaatcctgttctggagtacccgacc

SEQ ID NO: 76959 - DNA, 291 bp, synthetic construct
  source 1..291: mol_type = other DNA
ttcaccgcgaccgttgagccgacaaacaaatatctggctacggaagagatttcaaattatataattgatagtaatccggactatgaaaatatgaccattggcgtctacaacatccgtccctactcctggtggattggtccaaacacgatcattcttcatgcagatgcccctggcgaaatcgaccaaagtaatgtgagctattacatctcgcagagccgcattgataacttgaagaactttactgaagtaaaaaactctggtgggctgcacttatatgaaaacaataatttt

SEQ ID NO: 76960 - DNA, 36 bp, synthetic construct
  source 1..36: mol_type = other DNA
gcgtatagcctgttaaccatggattacgaaaaagac

SEQ ID NO: 76961 - DNA, 294 bp, synthetic construct
  source 1..294: mol_type = other DNA
agtaacttttcagcggatgtgcagacggatgactcggacgtgacagatggtggaagcggcaaacccaatgttacttctgtcagcggtgattccgagtactatgtcatgccggtagcgaatctgcataaagtgactgtgaatggcgtggataagtccgacacgattctgaacagcgccgtcggggttcaagcaaacgtaatcgacaacggcaaaattaccattaaacctggcgaaatcgatataaccaccccggatggtgttagtccggataaagctgttcagcgcccacagtta

SEQ ID NO: 76962 - DNA, 63 bp, synthetic construct
  source 1..63: mol_type = other DNA
atgattatcgaaagcatcatgccgtttgttgacggtattgtggatattttcacccagggcggg

SEQ ID NO: 76963 - DNA, 45 bp, synthetic construct
  source 1..45: mol_type = other DNA
aaaagtctgggcgtgcatccggatagcgcagcgatggccgaaggt

SEQ ID NO: 76964 - DNA, 897 bp, synthetic construct
  source 1..897: mol_type = other DNA
tatgaaccggctcaagaagaactgaccctggcgaagacaaccaaactcaacgagctgcatgagatctataacggtccattaaccacctcccagaacagcattctgttggaaaaccaaattaatgatgggaagactcccgaagaaattgagcggatcaacattttgacgccggcaacaaaagactggcaaagctttcacaaaaaatcgatttacacgaacaaagataagtataatcgcactatggcgatatattctaacgaaagcaaaaacattattctgtctaccactaaagccataaaaattgtcaatgagaataacgccgaagttctatcaaaaattaaattcgaagagccaaataccgtctcggtgcccattttgatctcacgtctgcaggcgggagcaggccttgtaaacgttggcagcgtggtggacatttacacgaacaacaataatacgaatgagaattatactcctaacaatacaagtccgaacatcagtggttgcactgttctggccataatgcgttatgaagacaacggggaaattgattccaaatattctaagagtaatacgattatcaagggcaaccataccaacccgaaagaaaacacgaaagaattttcctcagatgtgcttgaattaatcaaaggctcgatcattaatggttacgatgaggaaaaaaccattgaaatcctgaaaaattatggcatcaaactcagcaattacgaacgccagatcaacttaggtgatctgaatgctcagtacatgcttctgattgagaccccgcaggacaaagtggaatatgtaatcaacaatatggaaaatatcatcctgacaatcccgaccacgaaggcgcctaactggatggtcaatgagattagtagcacctaccaggat

SEQ ID NO: 76965 - DNA, 459 bp, synthetic construct
  source 1..459: mol_type = other DNA
ggtgaagtgaactacttttcaagtaaaatcgcggtggaacgtaacatcgacagcccaaccattctgatacctagcattggagtcaatgagaaaatcaataatgtcagcctgaaccagggcgtactaagtgacccgggtgaaaacatccccactaaagactatgtagcactgtatgggcatcggactcttcagggttcaccgtttttccgcctgaatgaactgtcgattggcgattccattctcttagaatggccaggtgttggagaattaaactacacaataacgaatacaaccattgtgcctggcacggctgatgttccgatcggtggcaacgattcgttgttcttgatcacctgcgatccgattgggtctacggccaaccgcatcatcattgaaggcaccctggaaaagcagaacccgattaataatgagattattaaagagaatccgcaagagtcc

SEQ ID NO: 76966 - DNA, 57 bp, synthetic construct
  source 1..57: mol_type = other DNA
aatccaatcccgagcgaaatcatttatgagaaaattatttttttaaacggcggtctg

SEQ ID NO: 76967 - DNA, 51 bp, synthetic construct
  source 1..51: mol_type = other DNA
ctgagcagtacctatccgacgttcatggatgccgtgtttgcgattcgcaac

SEQ ID NO: 76968 - DNA, 75 bp, synthetic construct
  source 1..75: mol_type = other DNA
ggtacgtgcccgactagcgcgatcgaagtgaccccaaacgccattgttcattgtgatacctgcggcgaagagccg

SEQ ID NO: 76969 - DNA, 36 bp, synthetic construct
  source 1..36: mol_type = other DNA
ctgaaagtggaggaatatgaaatcgcggaaggcatt

SEQ ID NO: 76970 - DNA, 63 bp, synthetic construct
  source 1..63: mol_type = other DNA
gcctgcccaggcgattttattgcagctaactcgagctccctgaccgttgcgatcccgagtgtg

SEQ ID NO: 76971 - DNA, 72 bp, synthetic construct
  source 1..72: mol_type = other DNA
ccaaccgaggccattcgcgtggttaccaaaacgggcatgagctgcccggcgctggtcgaaactgatgcagaa

SEQ ID NO: 76972 - DNA, 60 bp, synthetic construct
  source 1..60: mol_type = other DNA
agcaacgatgcgctgaaagtggagcagtatgaagtcaccattaatggcgaagccgttgca

SEQ ID NO: 76973 - DNA, 39 bp, synthetic construct
  source 1..39: mol_type = other DNA
gactgcatcgaagcgtgtccgtatgatatgattcataaa

SEQ ID NO: 76974 - DNA, 39 bp, synthetic construct
  source 1..39: mol_type = other DNA
gataccgcgattaaccagagcagttttgtgtcggacccg

SEQ ID NO: 76975 - DNA, 39 bp, synthetic construct
  source 1..39: mol_type = other DNA
atcccgattaacggcaccgcgctgcatgtgtttccatta

SEQ ID NO: 76976 - DNA, 45 bp, synthetic construct
  source 1..45: mol_type = other DNA
ccgagcaaagtgtttattccactgttcatgaaaatctttggcggt

SEQ ID NO: 76977 - DNA, 2190 bp, synthetic construct
  source 1..2190: mol_type = other DNA
agtgaaatctctgcggatgataccatcggcctcgcggatgacggctctgatgtggtgatggatgacaaacccattgaaccgtccaatcccacaacaccccacaaagtggatacaatgattgttagcagcgatacggtcagcatcaatgagaaagagaaaatcaaatccattgacctgactgtcaacgataccaataaatctaaagtcattgcgggaatcaccgttaaaaacctgacagtgaaagaggggacaaagaccatcaaatttgattataataactcgaaggtcattattaaagacgcactggtccttggtaaacatgatctgcttgtgagctatctaggtaacgaaaattacaccaattcgtccaagaacattgttctgaccatctttggcaattataccatccaggcgccaacttcagttgatgtaaacagtaccaaaattgttgaagtgccgatcaatgtcacaaatggtatcgatccaaaagaactggtaaaagatgattttaatgttaccttaacctataaagatggcaatatcactaaagccattaatataactgatttccgtattatcaataataccatcatcttcaattatccgctgtcacgaaacattacgacctcaaccataaccctcgtgtatacggctaatgaaacggttaaaagcaaaaacgtgacaatcaaccgcatttacaacgtgaagattgaggggattaatactaaaaatcagtacaagaatggtaattttacctttcggctgaccgatattgacaacgcaacggaaaatctgacgggttttaagctgaacttgctgattggtaaaaacgttatcaaccagatcaccggcacggcggacaagaatggtattgtaaactttaaaaccagcaagatattcggctatgacttcaacaacaacacaattgtaattaaatacctgaatgtcggcaataacacggttgaattgaaaagtggcgacaatgtgaaattgaccaccaataaagttaatctgacgattgagaaagccaaaatcaacattacgattgataagtacaacgaacagtatggcagcaacaaaaacttaaccattactgttatcaacgcagataacggggaaccggtgccgggaatcatcctacacctcaacatgcctcaaaccgccggcaaaaactattacatccagacggacaccaacgggatcggcatcatatctgttaaagggctgattcctgggaagtacaacttgactgtgagcaacaatgacacggtcaacattattaacaataaggccagcagcaaaattatcattaccccaaaaccggtgacaatcaagattacctcgggtctgactattaactataacacgggaaatacggcggccatcaaagttactgataaaaaaggtaaaggcgtgtctggagcctatgtgcttgtccagttatatacgggtagcaaatccgccaactatcttttccagactgacaagtatggaaacattaaatttaaggcgccgctctccgtggggaaacataagattgttgtgagtggtgcagtaggctactcgtcgagcaaagtgaccaaatatattaaagttaaaaaagcgacggccaaaatcagtgcgccaaaagtcaccgcatactacaagcaaggcaaatacttcacaataaagctgattaacacgaagaaaagcaatgctccgatttatgcggcaaaagtggacatccgtgtctacatttcaaattacaaatactacaaatttaatggcaaaaccggagtggacggtaaattaaaactgtcaattgatctgaaaccgaaaacgtataaggttgaagtgcgcggtgcagattccaagaattatgctgcgtcgaaagtcgtatccaagatcgtagtggtcaaggctccgacgaaactgtatccggccaaattaactgcgaaaaaaggcaccaacaagtacttcaaagtgacggtaaaaaacacaaaaaccaagaaagtgattcctggcgttaaagtaaagatcaaagtttataccggtaaaaaattcaaaacttatacggtaaaaaccaattcaaaaggcattgcccaatttaatgtaaaatcgttgagtgtgggtaaacataaagctatcgtcagttctgcaaacaaatattgcattgcgaaatcagctaaaaactacataaaaataactaaa

SEQ ID NO: 76978 - DNA, 180 bp, synthetic construct
  source 1..180: mol_type = other DNA
tacgaactgtcgtccgtggcgtcaacgatgcttgcctctagttcaactgctgacattaacgaaagcattctgaaattaatcacctatttgcatatcgatgtcaatccgaatgagatctcgcagtctattataagctcctttgaaaccattgcaagctatgttatgaactacggcgtaagt

SEQ ID NO: 76979 - DNA, 465 bp, synthetic construct
  source 1..465: mol_type = other DNA
gctcaggaagacaacagtgacatcactatgatgaccctgagcaaaggcgggattgttattcattacccaagcaactgggggtattctcagtccgattcgaattattcaattatgtcaatcagcaaactggacagcgtggattccgccggcgtgggtcaagttaacattaacttcgagaaaaaagccatcgaaggagatttttacacgtacttgaataacacctatcgctcaatgcagcgtgactcttccttcaatctgaccagcagtggtgaagtcatggtaagtaatattcatgcatacgaatatatgtattcttcgaaccagaatggcacggtgaaggagcacaaggcggtgtggtttgagaaaggtggccaggcgtacgttatgctttatagcgcaccggtcaatgatttcgaagataacttatacgtatttgattatatactctcggatatccaaattaca

SEQ ID NO: 76980 - DNA, 336 bp, synthetic construct
  source 1..336: mol_type = other DNA
gtctttaatctggacttcaacaacatcagcgagacctcgaccgtggccatggttcatgatacggcgtttccggatattacggaagatattaaaaacaccacaaaaaccacctcttcctctaacactaattatagctcgacgagttataatgtaaagacaacggaagacagcagcagtgattctgattacagcgatgggggccgcaactctggttcaagtgattcgacttactcaggcagcgactcgggttccggatcgtccggcagcgattcaggatcaggttccgggagctcaagtaatagtggtggctccgaatctaatggccgtagcgacgag

SEQ ID NO: 76981 - DNA, 93 bp, synthetic construct
  source 1..93: mol_type = other DNA
agtttcactaaagcttggggcgcgaatccggacacgttctttgccagcaacgtgctgcaagcaaccgattccatttcgggtatctttcagatt

SEQ ID NO: 76982 - DNA, 72 bp, synthetic construct
  source 1..72: mol_type = other DNA
ttaacgctgccgggtgccagcattggctatacccagatctttaccccagattggaatgcgttgactaacctg

SEQ ID NO: 76983 - DNA, 108 bp, synthetic construct
  source 1..108: mol_type = other DNA
ggcttcatggcgctgagcaccaaaattccatttgatcaactggtaaccgaagggacgggtttagcctttgtcgttttcccgcaggtgtttaacactatgggcccgatg

SEQ ID NO: 76984 - DNA, 72 bp, synthetic construct
  source 1..72: mol_type = other DNA
acggcagcccgcagcattttcttaaaagatatcgttgcgttccagcaagtgcatggcccgtttctgtttacc

SEQ ID NO: 76985 - DNA, 105 bp, synthetic construct
  source 1..105: mol_type = other DNA
agcggctttttcttatacaatgtgggtaccgacttgctgaatgtggtaccgccaacgattcagaacgtcctgcattatccggatgttactaacgcggggattatc

SEQ ID NO: 76986 - DNA, 102 bp, synthetic construct
  source 1..102: mol_type = other DNA
catctgagtagcatgattaatgccggcgtgtccaatatctataacgttttaggtacgaaaatcgcgccgaacatggtcaccgtggtaatttttgatttccgc

SEQ ID NO: 76987 - DNA, 93 bp, synthetic construct
  source 1..93: mol_type = other DNA
aactacggcctgcactactttgggggttatgaaccgattttggataacgtcaccaatgttgtgtatcatccagcgatcacgtatagcttcact

SEQ ID NO: 76988 - DNA, 72 bp, synthetic construct
  source 1..72: mol_type = other DNA
ctgacgggtagtgtaaatatcactgatattgtcaccgccgttcataacggcttagtgaacgcgaaaagcccg

SEQ ID NO: 76989 - DNA, 42 bp, synthetic construct
  source 1..42: mol_type = other DNA
ctgattatccatggcattagtagctttgtggggggtatctta

SEQ ID NO: 76990 - DNA, 90 bp, synthetic construct
  source 1..90: mol_type = other DNA
ggctacaaagctggtggggttgtgccaattatcatgccgggcatggataccagctggttcgccagtaacgcggcatatccgctgcctttt

SEQ ID NO: 76991 - DNA, 39 bp, synthetic construct
  source 1..39: mol_type = other DNA
agtagcttattcaaactgtttgaaatgtacattaaatat

SEQ ID NO: 76992 - DNA, 87 bp, synthetic construct
  source 1..87: mol_type = other DNA
atgcacctgaacattatcgacagtatctactatagcattattaccatggcgactgtgggttatggcgattacacgccgcataccggg

SEQ ID NO: 76993 - DNA, 42 bp, synthetic construct
  source 1..42: mol_type = other DNA
gttggcatcgaagatattattgacgcgctgaacgtggccaaa

SEQ ID NO: 76994 - DNA, 96 bp, synthetic construct
  source 1..96: mol_type = other DNA
accaatatgccgccaattgatgccatctttgaaagcatgagtgcgttaaccggcactggtgtgacaatgtatacgaacctggagattctgccgcat

SEQ ID NO: 76995 - DNA, 99 bp, synthetic construct
  source 1..99: mol_type = other DNA
ggcatgccgttattcgatagtctgtgtaatacgttttgcatcattagcaccgggggtatgaacgtgaaaaatgcgaacatgggctattaccataacgac

SEQ ID NO: 76996 - DNA, 102 bp, synthetic construct
  source 1..102: mol_type = other DNA
agtaacattgtgccgatggaactgttgtttacggttgtctcagcaattacaaccaccggcgccagcatctccagctcgctgactatggcgagttggccatct

SEQ ID NO: 76997 - DNA, 93 bp, synthetic construct
  source 1..93: mol_type = other DNA
ggccacgacccattcgatagtttatttgcgacggtgagcttgcagggcaacaatggtctggatctggggatcattaccaaccaaattcatccg

SEQ ID NO: 76998 - DNA, 117 bp, synthetic construct
  source 1..117: mol_type = other DNA
ttctatcctatggagatcgtcccagccatcgtgcagcgtatatttaccctgaacccggtttattccgcgattagttgcttccgcgaatgtattagctacggcatttttccgaatacg

SEQ ID NO: 76999 - DNA, 441 bp, synthetic construct
  source 1..441: mol_type = other DNA
agcaccacggtgggcaacgcgattactgtggtaaacaaaactgttgtcacgctcccgaacgaattttccattgagagtcgcgaaacgggctatggtacacttatcaacaaaaataccaaggaaaaaatcaccattaaagatctgggtaaagggaacttagctttaacgaagtttaaaaatgcactgacggatctgacaaaaaatccggatatcgaccatgttaaaaattcaaccagcaacattaacaatatcaccgcctacaaaatcgattaccaggacattaccaaagagaacaactcggatttgagtaatgtttatgtgttcacttgcaatcacacattcctgataaagctagaaaattataataataacgtgaagagcgataacgatctggattacgtcattacccatatgaccccagactttaaacagtctcaagac

SEQ ID NO: 77000 - DNA, 3447 bp, synthetic construct
  source 1..3447: mol_type = other DNA
gaaaacgatgtggcggtcagtaacgatgtgggcattgtgaatgagacggtgctagaagtaagctcggatgactcggacctgtcagaagctgatgtgctggaaacacagaccaacgttgtaacgaaggataccttccataactattttggcaacgatggtacattactggataacgtgagcagcgacgagttaatctttaaaggagattttactggaatcgatgtcagttatatgaccattggcaaaagcgtgaagctctcgggtggcaacaccacgcttaataatgtgaccttcatcattggcgcagataatgtggtgattgacgggtttgtgcttgaccactcggacgtttatttatttgatatcgaaaacgtaaatggtgtcaccttatcgaataacataattaacttcaaaacactggaagggacagagggttacgcgatttttgccaataccgtcaatgattttaaaattatcaataataccataaattatgttgggaatacaaaaggcacgatggtgaacaatgcgatccgggtaaccggcgacgaagacagcgcaattgcgtccaaaaagattattgttgaaggcaatgtaattaacatcaaaatcccgtctgtggatgtgggctatgatcctgtgacgtgggaatccaaggtgttttccgaaggcatcgtgttctactattgcgaggatgtcaaattcatcgataaccgtgtggatttaaaatacaataattttagcggtggcttcgataccatttatgccctgagcgtacgaggcaatccgtacaactttgagaatacaatcgttagctctgacatcgaaatcatcaacaacaccataaacgctaacggacataactatatctacacgattttcctgagcgcgaatgattttaaactttttaacaacgtcattaattccacagcggatttctattacgctaacggcattaatattgacggtccggcaagcgaaggcattgtaagcaataacttgatcagcgttgaatcaccatatgacgtgtatggtatctactcctaccagatgaacggccccatcgaatatatttcatatgtaaacaatacaattataggtaaatcgtatgtggggtgcgggatggaaatcgtggaatgcaatccatacattgcagataacctcataatcatgaacggtaattacacttttggtgttgtggcaagtattcgtgataacggtacgatttcgaacaattcaatctcgtctctgggaaacaacaatggaaccgatggcacgggcgatccgttgttgccgttaaactccctgggtatcagtgtaaagggtagtgtattgattgagaaaaacaaaatcaacagcgggggtattggcctgaaccttgtcgaaaaaggcaatatcacgatcaacgataataacattaatgttaacacgacgggtggtgttgaaagttacgccatttactctgataaattgagtaacctggtgatcagcaacaataatatcctgtttaccggaaataccaacggaactatggttaataacgcgattcgtgtaaatggcgatgaaaataaaaaaattatcgcgaaaaacattattgttgacaataacaatatcaacattaatattccgagcattgatgtgagctataacccggtcacctatgaggccactgtttacagcgaaggcatcgtgttctactattgtgaggacgtaaaatttatagataaccgtgttgacctgaaatataataacttcagcggcagtttcgacaccatttacgtcgtgagtgtacgcagtaacccttataactatgtgtttgatgaagaagacaatataatttactccattgtcagttcggatattctgatctccaataacacggtcaatgcgctgggcaacaattacacgtatggtatttatatttcggcggagaattttacggttggggataatttcgtcaacatttcgagcgatgggaaatatgcgaatggggtcaatgtggacgccttgtccagtaatggcgtgatcaaaaacaataacgttattgtgaacgctgatattatcgtttacggcgtttattctgcaaattttatgggtcctattgaaaatatcacgtacgataacaataccattcgcgtgaacgcgtatgcggcttgtgctatggaactgatggagcccaatccgtatgtgtttgataacaccatcatcgctgcgggcaattatacttttggcgtggttgcaagtattagagataatggtactatttctaataattcaataagcagcctgggaaataataacgggaccaatgggactggagactcaattctgccgctcaactctctggctatcagcacgaagggtgacgtgataatcaaagacaatgagatcgtgacatcagggattggtgttaaaacactgaagggcaacgtcgatatcctaggtaacgacattcgcacgaccggcaatcacactattgaggcgatcaattcaaatctcactgtgaaaaataactatttggtctcgaaaaaagccgtcggtacggattccattgtttcagataaggaagtgatatcggcgaacaatacccctgcactgaaaaccattatctctgcaccaaacatcttcaccgaatatattaaaggtgccgtattcccagttgcggccctcgatgaaaacggagacccgatttcagatattgtgctctttctgacaatggacggcattgtctataacgtaaccaccgacgccaacggctatgccgcctttctgcttaaccccgattcagggattcataacgtggtggtctcctttaacggtaatgaggtatatggtccgaagtccgtcaacagtatcatttcggtggatgcatctgcaagtaaaatcgttgccaaaaccagcacaaccgtctatctgacgtccgttaagagcgggtcatactttaatatagcggtaaaggacgtgaacggcaaaggtctggccaataaaaaagtttctatctacttcaacggtaagaccaagagctacaccacaaactccctgggagtcatcaaattcaaactttctgcgaacaaaataggcaactaccagctgaagatgaaattcgcgggggataagaactatactgcctctactgccatcgcaaaaatcaaagtcatcaaacaagcaacgaaattaactgttgcgaaaaagactttcaaagctaaaaccaaagtcaaaaagtacaccattacgctgaaagacaacaaaggcaaggccattaaaaaagccaaagttaccattaaagttaagggcaaagtctacaaagccgttaccaattctaaaggtaaagcgacttttaaaattaccaaactggctaaaaaaggcacgtacaaagcgtacgttaaatttgcaggtaacaaatattataaagtatcttcaaagagcgtgaaaatttcagttaagcgc

SEQ ID NO: 77001 - DNA, 3990 bp, synthetic construct
  source 1..3990: mol_type = other DNA
gataacatggaggatacgttgaataacaatggctctatcctgagtaatccgtcggatgagagtattctgctgtcgaacgacgatgttctagcggaatttacaacccatgaaatcaacgtagaaaagtattcgatctattttaacaacaacggtgatctaatttcgtccaaggtgaaaagcggggacaccctgaattttaccggagactggaacgaagtgagtagcaaaacatttaactttaataaaaccctgaatattgtgtatagcggaagcaaaccaatgaaaaacggtgttttcaccttttacaacggcgcaacaggaagttccatcattggcctgaatattgcgaatactgaggattataattacggcatcttcttaaatggtgccagtaactgcattgtaaaagactgctttattaacaacacaggcatgtcctcgtatgccatctgcatagccaacaacgccaactacaacaatgtatcaaataactttttctgcgattacgggatgaactatgggggccagggcacgcgatcaaccccgccggtcctgctgtctggtgcgcatcacaactatattgccaacaatcatattgaatgtgatgatgccaacgggatctatttgtcgtactatgacgggggcccgttgcatggcggtgtttccaactacaatttaatttacaacaacaccgtcaaatataacgtgttgcccacttcctggggttatggtattcagataatgggtggatacaataaaatttattccaaccgtatcattggtgcattcagaggcatttcaacgtcaaacggtgcgtttaacgagatatttaacaaccgtatcattaacatcacgggggcggactttaaccacccggtcgtcgaggttggcggggagtacggcattgtgggtagcgcaaacgcgataataatcaacaactcgattgaaaatgcacgcatacttccgggtagcggtgcgatttatgctatcgataatgccatcattgagaataacactattgacgtggtgtcatccggatatggtattcaggcgagcggcagtaacatttcgatcaaaaacaatagtatcatcaccgaatctggtgcgggcgtcttctggaaaggcgaatactttgacctggttgtcgtgggtaataacattaccagtggaaatggcgtcggcgtgctcgtcaaaaaagaaagcgttaaaaaaatgccagggaacataactattgtcgataactatatcagcactggaaataagtatgccattgatgcaatcgaggtgaatgcagataccagttatgttattgaaaacaatacgattccgaagggcaaaggtattgtggccactccggaagggagctatgacccatccaaaccacgttatatcttcaagggcacaacctacagtatcaccccggaaaactacgatgattatttcgacgtgggaggtaccttaaactccgtggtgaaaaacggagatattctgtatttcgatggcaatttcgagaataagggtgtcatctacattaactctgcagtcaaaatcacggggaagaatccgaatttttacaatgctacttttcgcatatctgaaggtgtctggatcgaaaatctgacaattaaaaacaaagatagcgagcggatcaatgcctggggaatcctggtatataatacgggtggcgcgatcatctcgaattgcaatattgaagtaaccgacccgaacgccgcatatgcgatctatgtggtcgaatccagcgatattgatgtgttgaataacaaccttacctctaacggtaattacctgacctataccctgcttgctatcagcgtctacgactgtaacttcatcaataacagcattcataccattggaacgggcattgagcacgtctttgaaaacagtcactgtgtggacggcaattctaattgtattgacggtagcacgtgtgttggcggagatacggtttgtacaagcgggaacacgataactggaaatcacgtgctcaatgaggtgtataggacgtacggtattttgatggcttatagcagcggctgcaatatttctggtaataaagtaaatgccacgagtaagcttaacaaaacaagcaataccttcaactcaagttggggcaataactatcacaataacatctccacaaactctatcgttggtatagacctctactttaacagtcataacaacaccttttcaaataacaatatttatgtcaagtcgaatgataactatatttatggtatgggtgtactgggtagcaacactgggcatgatgctcctgaaggcaaagatgccagcaacaatcagttcattaacaacaatattgtgctggaaggcgattattttgtgcagggcctggtgattggccatgaatcaaaaaacacaacgctcatctcaaacaccgttaacgctaaaagcaataatttctcatatggtatcaatctggaagggtcgcaaaaatcaatcattaaagataataacctcaaactgacttccgatattgtgtatggcctggaagtttttcggtcgaatggtaactttattaaagggaataatcttgatataaaagctaagcaggcatacgcgattgcactctcaaatgctgagaacaatattatcctgaacaacattgtaatgaataatgtgacgggtgaggaaatcacctacaatgtgtgtgattccttaggtgtgggggtggcgggcatctgcctgaaatttaacagcagcagtaataatatatctggcaataatatcacgagcaaaaagggctatgcaattgtgatcgataaattagccatcaaaaacaacctgttttacaattatttaaattcggaaatgggcatcggcgataaagcgattaacaacaccaacaataattttgttaaaggcaattacatctatattctgaatggcctgatcccggaagtaacgatcaattatctgggcacggcagacattgttttgaacgttggtgttgatggggtattggtgaaattctacatttgcggggaagaaattggtaatgctacctcttccaatggtgtcgcaaaactgcgctacaaattcgatgacagttatacgcctgcgggctactcgattaaagcgattgccagcaaaaaggactacctgactaaagagttcattagctatctgaccattgaaaaaggtcttctgaatattaattacaatgacgtaacggccattcccacatctaagggaaaatttgtagttgttgtagaagatattttcggcaactcggtctctggcatcaccgttaaattttaccgcctacagggacgcgatgtgttcataggcaaagtcaaaactgataaaaatggtgtagcgaccctggtggcggaagtaccttcacttggtaattacaaactgcgtgcagatgtggtggaaaatgacaacttcaagagcaacagtggcaaagcgaatttgatcgtggcttacaaaccttcaatttatcaatataaaacgaaagcggtttactatggcaacaccataaaatatacggttcgtgtgaagggtatcgacggcaaatatgttgcggggggtaaaatcgtcactatcaaagttaacgggaaaacctaccgtgtgaaaaccgacaaatacggtaaggcctacaaatccattaaactgaaagcagggtcttataaggtaacggctcaatacggggtgaccaaagtttccagtaaaattaagtttaagcccatcttaatcgcgaaaaacattgttaaaaagaaatctaaaaaaattaagttctcggtcaagctggttaataagcatggcaaaatcttaaaatacaaaaaaattatctttaagattaaaaacaagaaatatagcgccaaaacaaacagccacggtgtggcgatcttatcgattaaaaacctcaaaatcggcaaaaacactattacctcattttatggcggctgcaccatctccaatacaatcaccattcgccgc

SEQ ID NO: 77002 - DNA, 4608 bp, synthetic construct
  source 1..4608: mol_type = other DNA
aacaacaccacagtcactgacgtcctgtccacggtagaagatgacgttggcattcagcagatacagagttttcaagtagacgaaccgctcctggcggcgaccaacaacaatattcagatcaacgtgaaacatcattataacgaaacggctaatacatgggatgaggatgggtataatctggcgaatgcaaccgtgaaactgtatggtgcgaatgataaactcatttcaacccataagacagactcaaaaggtagcgtgctgattaaaaacctgaaatccaccaaatactatgttgaagtcagttatgccgattatgaaccaaaaaaaagcaaagtcttggattttacgaaaaaatccggcactctgaaaggaagctttgactttatccctgatatcctactgtttgtagattataaatcccataatgagaagttaaacgtgctgatgaacatgtctaagcgtgtggcgttcattagcacggggcaagattacgacgtgtcgcgtgaatggctggttgggtatgcccgtttcatccatattgacatgttttccgaaggagcatatgccatattcaccgcggaaaaactgaaaaaattgcttgcgatctcgcccgcgaatgcgaattataacgtggcatacaccttcggtgtttacagtaattccattttaaacgctacggggctgcacattgtgggggcaaactcgaagaataatacgttcaataccattgaaaacacgtacattggcagctatttccaagccaaagacattaacctgtcagatgttttgtatcataatatggaaaactacctgaaatacgtgtattatctgattaacccgagcaaatacgaaaatcccacactgaatgactctaatgctcctcaaatgggcccagaatgcggattttaccatccagatctgggtatcttcaccatctatccggaaggcagtctgataaacaactggattaaaaccaacccgggctatggtgtggatggaattgggagtctgaactggatgatacaggattatccaaagtggtttgtagatctattggaccctactacgctgtttgaacagtttgaaaatcagtttatcgatcgctttaaccctaacaagaaattcatcgcgattgtgtcgtactattgtggtggggaagtcgtggattcgctgattcgcggttacgaagaaatcggccgtcctgccttcaacgtttttaaatttagcacagatccgtccatgtcttccatcctgaataaaatcaacaatgtctcaaaaatcggaatttcttctattacgagtctgtatagctggtcgttaagttacgcgaacgggtcggcggaaaaagatctgtcggatattgatgttgaaatcctgaaaggtgtcaatgaaatttcaaaatacagttacgaaagtgaacttggaccgcaggtcgagtggacctacagcgtgacctacccgagttttgaaggggtgtttagcccggttattctgtcgtatctagacgaggataaggtgcacgtaatccaaagcggcgtggacaagatggtgcagctcagtagccgctgggcggatttgaaagatctgaataactctgagaaaacaatcgctattgttctgtataactacccgcctggcaaggccgaaattggcgcatcttatctggatgtaatgcagagcacctatgatctgcttattaaattgtacgaaaatggctacgcgattggggacatccgcaaaatgatgaacattacagaatttaccaatttattaatcgacagcggcaacaaaggctcatgggcggggggtttgttaaaaaaatatgttgagaagaattgggacgaactggttaaacataaccaactgatcagcatggacgagttcatcgatttaaccagcgatcttccagatgagctgtacgaggaaatggtgactcagtggggcgcgggccttggtaaatcaatggtttataccgcgagtgatggtaaacagtatttggtgatcccgggtgtttggttcggcaatattttcatcacttaccagccaagccgtggttgggaagaagcagacattggcgaagtgattcagaactaccatgatctgaaattaccgccgcatcagcaatatgtggccttttatgagtggatggataaagtaaccaaggctaatgccattgtcagcatgggaacccacggcaccctggaatggctgcctggtaaaaacatcggcgtgggctcgggcgactggtcctacgaactgacacgaatccccacaatctacccatacatcgtaagcaacccgggtgaagctatggttgcccgcgatcgcggtttagccatgctgattacgcacatgaccccggcgattgtaagctctgagctgtatggtaattattcgatcctgaacaattatatcaatagttataataaccagattaaactcaatgttacctcgaatgcgaatatctacaaagagaaaattcttaagttagcgccgaatttaggtttccgtaagatgtctaagggtgagtcttttaatcactggcttgaggaattgcacctttatcttgaaagcatgggtgatgacctaatgacgtatggcctgcataatctgggtaaagtgctgaccggcaacgaactatctgaagaagtggtgaccatcgtaacttctcagacgaagatttataaccagataatggagttcctgtatccgaacttaaaaggcaaagacttttataaagatattcagggagatgtcaaatacctgaatgaacgtcatacgatccaggcattcctgcgcaactacgtcgacggcctggttaacggatcgtctgttctggatttggtgaataagctgggggtaaataaagatagttcattattctcatccatgaaatatgctcaagacgtcattataaatatccagaataacaatgaatggaacgccattctcacggcgctgtctggtggctatgtgaaagcaggtctgtttgcggaccctgcctatggtgattcaattccaaccggatacgatggttatgcatccgatcctactagaatgcccagcgaagcagcatacgaatctgcagtcaatatagtgaatctgttgctggcggattattacgagaaacatggtaaatggccggagatgaccgcattaatcctgtggggcacagagatctcacgtacggaaggcattggggtggcagaatttttatacttcctcggatgtaaaccgaaatgggccgaaaacggtaaagtaatcggcgttgaactcctgccgctgaaggacctgaaagtgaaactccacaacggtagcgttgtcaaccgcccgcggattgacgtatatgcaagcctggttaccagtaataaagattggattacgtggatggtaacggccactcgtctggcggccaatgcgggggaaagtgagaatgacaattatgtgataaaacattataatgaatacccgacgcttgatcgcctgtttggtcttccgggcaacattctggaggggacgggcatgagcacgcttattcccaacaccgctaactggaacatttccacagttaatgtggagggcatgaatgtctatttggataccgtttcattttcatggaccattgatgagaagggtaacatcaacatcaccaaacagaaggacacgtacaaatacctccttacaaagacagagctgataacccaaaacctcgacagtacctggcgcattttagattcggacgactactatgactggttcgggggactctataacgcggccagcattttacgccagaaggcaggcctgagccgaccggacactagctttgtcgatatccgtgataagaacaaatatgtcacgcggacttacgaggaagagatggagttcgaaatccggaccactctgctgaatcccaaatatctgaaaccgcttaaaggaaccgctgccggtatgaactggattgcgtcccgtatgcagaatacgttcggcatcttgacgattagcggtaataagttgaacaaggaactgggtaatcagatgtccaacaccctcctcgacctggctagtggcgtcagagatgccagtacctcgtacggtatccaaagcgctatcgcgcacatgatttacttagccactcagggcacgtgggatgccgatagcgaaacccttcagaaactcgctgacgaatacatgaggcaggtgctaaaatatggcgttgcatgttgccaccacacttgcaaaaacttggattttaacaacaaggtcattcaagtaagttcactgacgccggcgcaaaaagcagaatttgccaaaatattggcccaggcgaccaacaccgatccgttgtatgaggtggaaaaagattccgcgaacaatgataacaacgcccagggcattgttaatggcactactaaagacaaacagtccgattcagaaagcggggataaaacatcgtttggcggcgattcctcgcaagccggtgatgcaaaatctgcttcccaatcgcaggattcgagtgattcatcaggtgactcaggcgctgatgcatatgagttgtcccaacaatccgcctctaaatctactagcggcgcggaaagcagcatgcca

SEQ ID NO: 77003 - DNA, 765 bp, synthetic construct
  source 1..765: mol_type = other DNA
gccaatgattaccaaattgttatcacctacggtgaaacgacaaaaaacaatgctgaatataagaacactgttgattctttctttgaaaatcaagcgcacatggatctgaagggcgtaaactccaaaatcatcacggccaatgaagtgaacaaaatttccagcaccatcactgggaaaagttataatagcaatcagattttcagctcagccctggttgatctgggcgataacgataaccttaaagttagcgtagacaaatctaaaattaccaccataactggtgatatgtatctctccgcactgaagtcggcaggaattaccaatggccatgtatatatcaccagtccagtgacggcgacgggtgagtctgcgctggcgggtattatgaatagctatgaggtcgcgacggatgttgaaatcccggcaccggtgaaagaagctgcaaacaaagagatttatacacaagcggaaattgtcaaggagagcaatgtgtcggccgatgacttatcaaacttggtggacgacgtcaaagaaaccgttaaagaagagaacattacagattaccagaccatcgtcaatataatcaacaacactaccatcaattataatatcaacttaacatacaatgacattgaaaacctggctgaatcgattgagcagattcagaatgtgcagggcgatattaacagttaccagacggaagtgaatgacgtgttgaacactaccgatacctcaaacacgggctttctggacgggctatttaac

SEQ ID NO: 77004 - DNA, 24 bp, synthetic construct
  source 1..24: mol_type = other DNA
atggaagcgattccgaccatccca

SEQ ID NO: 77005 - DNA, 459 bp, synthetic construct
  source 1..459: mol_type = other DNA
tacggtattaccaacagcgataacccgatcttctctgacctgtccagcatgtcggcaaacgataacgatgcgggcaatggtatagggaataatacggtgacgggcaacggcagtggtaacacgatcgccaccacatccggttcaggcagcggctctagctccagttcaagctccggcagcggatcaggttcggggtctggcagtggctcaagcagttcgtcgagctccggcagcggatcaggttcgggttctggagggggatcgaatagtaactctcgcacacatttatcctattcagaagcgaaaagcattgccaatgatgcgattgaggaagctggttgctatgcaggcagtgggagctattctggtggctactggtactttactgtctatgatgccaatggtaacaatgtagacaccatcagtgttaatgacaacactggtgctaccgggcgtggc

SEQ ID NO: 77006 - DNA, 66 bp, synthetic construct
  source 1..66: mol_type = other DNA
ttaaatgtgtttccgaatctgaactccattgttatgagctcggaatatatcaacaacagtctgttc

SEQ ID NO: 77007 - DNA, 48 bp, synthetic construct
  source 1..48: mol_type = other DNA
ttaatgggtccgatcgcgagcctgaaccaggtgaccggcctgcatatt

SEQ ID NO: 77008 - DNA, 354 bp, synthetic construct
  source 1..354: mol_type = other DNA
aacactgcgatttccatcccgagtccagactattcttacgattcctgtgaatttcggacggcccaggatgtcatggaaattctgagcgggaaagtgaatttcacagatcgcacctttattggcgagatatcgaaaatcctcaaggataacaagaacagcaaagaaagcatcaatctggtttccaaaatttgcaaaaataaattcaagtcgcttaacctgaccaactatcgctttactgagaataaaattttaaaagaaaaaatcttggactcatcaggtgattacagtaaaagtaatatggtgagcgttgcaacccgtaactatgatgactactcttatacgctgagcgtatgg

SEQ ID NO: 77009 - DNA, 33 bp, synthetic construct
  source 1..33: mol_type = other DNA
aaaattatcccggtgtataacattaataaactg

SEQ ID NO: 77010 - DNA, 54 bp, synthetic construct
  source 1..54: mol_type = other DNA
gcctgcggcgacctgccggataaaaacaccgcgagtagcttcatgttttatatt

SEQ ID NO: 77011 - DNA, 2736 bp, synthetic construct
  source 1..2736: mol_type = other DNA
gataataagaatgaaaccttactgactcagaaggaaaccgattcatctcagaaattatgtaagtcaagtgtttcgaaggaaacttctaaaaaagaaaaagtcacgcttaaggcccctaacttgaaaatgtattataaggatggaagcaagttcaaagcgaccgtgaaaaataaaaacaaaaaagcgatcaccaaagctaaagtggattttactgtgaatggcaaagtttataacaaaaaaacggacagtaaaggtgatgcttaccttaccattagcagcctgaaatcgggcaactatccgattaaaatccgctttgctggcacaacgaaatacacggcgatctcaaaaaagagcacaattacagtgaagtctaccatcaaaagtaatgatttcaagaaatactacaaaaacacatcgccgtacacgtctaagttttataaccagaaaggcaatatcctgaaaaataaagccgtgaaattcaagctgaacaagaaacactacactgtcaaaacagacaaaaagggtgtggggaaactgccgattaatttaaagcctggtacatacgccatctccattataaaccccaagacctctgaaacggtcaataaaaaaatcactatcaaatcgctgattaagactaaggacctgagcattaatgggcaaaatgatggtaaattcaacgtcaaagtatttaataataaaggcgaagtgtatccgaatcaaaaagtcacctttaagattaacggtaagacgtattcaaaaaaaactaacaaaaacggcattgcaaccctggacatcaacttagatgttgggaaacacagcatcaccaccgagtatatgggtcttaaaaatacgaataaaatcaacatcaataaaatagtgaaatcaaccaattatatccataccaccttgattccgaattatgttaatgtgaccgccaaatatgtggttaataactctgtttactgccttaagtctggaatcaacggcatcatcaaaatgccaaaaaatgagatctttaaaattcaggttgggggtaaaatttacacctttaccaccacgtccattaacggtataaactccatcacgcttcggtacaataacaactatctagtgccctttgatgggagtggagtaaaaagttatacaaaccgtaacaagttgacctcagatggtataattattagcaaagtaaatgattacacgcagattgactatcagagtaaaaccaaagacaataccgctttattcggattttatgcgagtaagggtctggataaaagcgaaacgctgacgtatgtggaaaacgataaaataactgcgaaaattaacttcaacacattgtcgttcgatgaatttagcctgcgatactcgctgtctgcattgcatggcaaaacgatttacaatttcaactacggcaattacaatgacacaattcgtttcgcgaacaccaacacgccggtaacattcagctattttggcaacagcatcgtaggctatgcctcccaggaaaccattatcactaaatttaaagtcgatgaaattaaagaggtcgaaaaagaagagaatatatcgtacggcctgaataaaaagtatcgcactgccatgggctttgaggtgctgcaatcgtatactctgattaacgagaaaatcaatcaaaaaactctggagaattgggtgctgaaaaacccggactatctgagccgttttggcgtaatgaatatttatggtatgcatttagcatctctggaggtggcttggattgcggatataatcgcagataagagctccaaagaactgaacgtgaattggaaacgcaacaacaccctcacaatcctgggtggcatcaacttggaagacacgtatctgaacatcctcaatgcggacatgggtatgaaagtaacgggcaaatttgacaatgcgttcctattcaaactgctcaattccatgaatctcccgaacattgaggaatacgcgctgttgaaagtcgcatatcgctacttggacaagtcgtccaactcattagataacgtctttctgtccattctcaaaaacaacttcagtattgcccagctggatgacatgatttacattttttcagaagccaatagcaagtctgcgattatcttaaatacgagcagcggagtgtccagtgtcgtgctcgcgcagaactccgtttataaaggctcatcgctgaaaaccacgcatgactgttgcggtgttggaattatcccaaaagacatcataaaaggtattaaagaaacctttaacattattaacaacgggctgtcgaacatctaccccaacaagacccacccgattagcaaactcttttatatggctgcaaatctgcttgccaaaccgttgaatggggttggctcactgggtatgaacctgattaccaccatggcacttatccaaagtggcggcaccacctatcggaacgaaatggttgaaaaaagcgattggcatgaggttatggataaaattacttttacgagaccaggctatctgcagtccaaaaaaatttacaatattccgaatgaaaaaggtggttgcgattttattgaagtaaaaatccgtgatgatatgacactggatcgcaacaatgcaatctatatcagtgatgggaaaacgcgtaaattaagcaaaaccgagacgtacaaatatttcattgatgactactggaccccattcagtatgcctcagaaatattgggataagagctggaaccgc

SEQ ID NO: 77012 - DNA, 42 bp, synthetic construct
  source 1..42: mol_type = other DNA
ccatacttagcgtatggttatctgggcaaaccggaagccctg

SEQ ID NO: 77013 - DNA, 36 bp, synthetic construct
  source 1..36: mol_type = other DNA
ggcaaattcctgacctttgatgacattggttttttc

SEQ ID NO: 77014 - DNA, 54 bp, synthetic construct
  source 1..54: mol_type = other DNA
gaaccaaccttacgcgttctgtactttaaaaacccggcatatgtggcgggcgcc

SEQ ID NO: 77015 - DNA, 210 bp, synthetic construct
  source 1..210: mol_type = other DNA
tggaacatgcagaatattgtattcaatgaaaatatggatgaacaacagaaagaaaaggtgaaaaacgcgattaaagaggtctcccaaattgaccagggcaacgaattaaacgatactccggatatcagtaaatcgtctggcaaaggttttacggaaatgggaaaagtttatcgcgatagcgacaccggtaagctgatcatggtggagggg

SEQ ID NO: 77016 - DNA, 63 bp, synthetic construct
  source 1..63: mol_type = other DNA
atggtggcgattccgggcagtgaatttctgaccgcagccttgaacgtcgttagccagtccctg

SEQ ID NO: 77017 - DNA, 51 bp, synthetic construct
  source 1..51: mol_type = other DNA
ccgggtttggcagcgctgggcaacggggatgtgagcaccctggccgcggct

SEQ ID NO: 77018 - DNA, 33 bp, synthetic construct
  source 1..33: mol_type = other DNA
aaaattcagctgaacagcattatcggcagttat

SEQ ID NO: 77019 - DNA, 57 bp, synthetic construct
  source 1..57: mol_type = other DNA
aacatcatcagcctgaacatgggcgacatgaaaccgattaatattgtgagtattgat

SEQ ID NO: 77020 - DNA, 372 bp, synthetic construct
  source 1..372: mol_type = other DNA
gcacatccgggtcacggttctgagtacgtggaagaagtgacgtcagatgacgtgggttcctcaagtaactccgggtcgtctagcggtagttcggggtcgtccagcaactcgggcggcagcaccgttccagcgtcatcgagctctagtagctcaagctcttcacgcagctccagttatagcagtagcgacccgtatagcagtagctcgagtagctccggagctcatgacagcaaccacgattcataccagggctcctcctctaattctgttgtcaaggataattcttcgctgaaagacgccaataaaaccaatgaaaacctgactaacgattcaggcgaaattgataatgatgagttatttacagtaaacaat

SEQ ID NO: 77021 - DNA, 2829 bp, synthetic construct
  source 1..2829: mol_type = other DNA
gaagacatcggtaactcagatgtgttcgagaacccaatcagcacggatattcagcaggacgatctctccgaagacgatctggacatatcaaacctgaatgttaaagtgaactaccaatacgcggatgataatggaaaaataaatccgaccattaaagtgaacgacaaacacattatctcaaaagaatttaacagttcctatcagaattacaatgttatcattaactctacaaatattgccgataagcttaatatttctatttctgcaccgggctatttgacccagtacaaaatagtcacccccaacatgggtaaatcgattttggctaatgtcacctttaacatggaatcgtctgaaagttacaagctgggtcgtgacgtcacggcggaagcagataagctgctggattttaaaaatgcggatgacgttctcgccatcaccacggcgggggttgccaaatacaacggtaagactagtgaggatgccatggaagcaatggtgaactatggaaaaatctcgtatagcaatatattaatgttacgccagagcgctatcgatccgattgactttgcttttattgttaagaaagggaacgagctgaaagcgatcattttccagaacgcgtctactaagtattcatatttgggcacaatttctgagaacatgacaaaggctcagtggaataaatactataagtccctggttggggaaaattcctgggcatttgcgagcttggcaaatggctgggcggcgggtgtttcgcgcgaaatccttcaggaagccgcctttcatggccatatttgtgaagggactttgggcggatatagcattatccaggctctgttgaaatactacccgcctgagcaggaaaacaatcctggtggaattggttcgccggcagatattacggcttacaaagtcctcggcgttccgggcggctcggatgatgacgccgcactgttcttcttagatgacaccatcggtaaaacgggctatgctggtatgaacaccactaacaccggggcgactgagaatatgattggctttatcaaatggaatagcaaacagaagactggtgatctcattatcatgtcatttaactccaccaaactgaaaaaactgttcaaaaaagaaactaagatcaatgcggacgcgggcagtttggaggagttgaaatactgcagctggtggattaataaaattaataataacccggaaaaattagtggattttttatacgaatttacaggtttaaatcaagaacaatacaactacctgatgggaaccaccgaaaacatcacgtatgatggtgagccggccgagtatggtcttgatgggcacggcctggacctgaactatattctgagcttgaacctccccacggctaaaagaacaatcaatagtgtggcgcatgcgaaactgaccgatgcggagctgaaacagattggtattgacgccgccaacaaagcgaaaaaaattttcaatgaagaactgggtgtggaaattgatcgcgatgacatcgatttcctagcgttaaccgatgccggatatgcatttctaaacggccaagacaccgtcgtggttcgggatggcctgcacgaagtccttggcggcacactgtatagccaaaatctgttaagtcttcaccaggccgtatggaaaccgctgtggttcgcctttgccattcgttacccggattctgatctggttgatatgatttatcttcgctacaatccagacacgaaagacttcttcgtgggcacgcttgatggcaaccgagtggtggatattgggtttgaaaccctgaacaatagcgataaactgaaagcgattgcaaaatcttttgtgcctgatgggaattggtttaacatccaaagcattgtgaacgcatggaatgaacatcctctgtttgaccagatggcgacgttcctgtatcatgcgcatgtatgtcccggcgtgcagccggggttctttataaccgattacatccaggaaaaatatccactgggggagaatgaatcgtacacgtacattgcaagcagcatttattgcaaagatgacagtttaacctatctactggatctcagcccgggcctcggtaccttttatgtacaaaaactgcccaaaaacgaaaccgaaaacggcatcagccaaggtgttctggtcgtctgggataaaaaccttaagataggtaaggcagtgattgtgaatttcgatgattggggtaccattgacacaagcatgtatgtaactagcgaagcaaaacgtgcgagtcagatcaaagcttatatcgacatctatggcaatcgtaacaatccaaacgtgaagtctaaaccaatcgtctccaccgtaaatgagaagtggattacggaagaacagttcaacatgctgaaacagggcgcgggtgatgactttaatgtactgtcatacctgaaaagcctggatgacatcacgaaagaagacttactgaagtcaatcaatcaaaattccaatagtaactccaattccaactctaagccaaacattaaccctaacagcaattcaaactccaactcgaacagtagttcaaatgcgatagccagccacacaaattccaacccgtcatcgtcgggaagcgtgggaacgagcggcgccgtcgtttctagtgcctatgttggcgagttcactaaagatgcggaatctgaagactcacaaaacggcccggatgatgcaaaatcatatgaggtaagcaagtcgccggccgccaaatcggcagactccaacagtctgatctatgctctcatcggtgtcctggctattgggatcttgcttggcgtaggttatatgaaa

SEQ ID NO: 77022 - DNA, 33 bp, synthetic construct
  source 1..33: mol_type = other DNA
agcatcccgagtccgctgggcgtgccaattcat

SEQ ID NO: 77023 - DNA, 351 bp, synthetic construct
  source 1..351: mol_type = other DNA
tcacacggcgtcgatgtaaccgccgacaccatggttgtggcgaacgatagcaatggtaaaatggtcaaaagcattgcggaatcgaacaatattaacattagcgtttacaaattcacctctgaagatgaagttacacacatcctggaacatagtataaacaacaccaacaaacgtatcttgttcacggcatatcaagagacggctaatgattttctgaaaaagcatccagacatgtccaaccgcatcattgtgatcgataatgtgaacgacaatactactctggagggcttacagaatattatgaacgtgccggtagagaatgtcaatagtgaaaataactttgggcttccg

SEQ ID NO: 77024 - DNA, 33 bp, synthetic construct
  source 1..33: mol_type = other DNA
agcttcgactatcgctttgaagatccgctgaac

SEQ ID NO: 77025 - DNA, 54 bp, synthetic construct
  source 1..54: mol_type = other DNA
attggcggtatcccgctgtttaacagtgtgttaaaatccaacagcaccacgaat

SEQ ID NO: 77026 - DNA, 240 bp, synthetic construct
  source 1..240: mol_type = other DNA
tcccaaagtatcgctaatcagcattggacattgaatccgggtcagctggtactgtatcgtgcagcgtttaccctcgaagtttttgaaaaaataattccgcttgccggtagcacgaacggacatattttaagtatgattttctcgtctggcagccctcgcacgtttatcggcgagtatgtcctgcactacaacgtgtgcctaacttcaaccctgttcgggccagtgaccctggatttcggc

SEQ ID NO: 77027 - DNA, 57 bp, synthetic construct
  source 1..57: mol_type = other DNA
gcgctgccggaattacagattacgtactattccacctttctgtcgttctttagtagc

SEQ ID NO: 77028 - DNA, 33 bp, synthetic construct
  source 1..33: mol_type = other DNA
gtggccggcttaggtgcagatccgctggctgcg

SEQ ID NO: 77029 - DNA, 45 bp, synthetic construct
  source 1..45: mol_type = other DNA
ttaattgtgatgggcgcgagcgccgttctgaaatatgcaatggat

SEQ ID NO: 77030 - DNA, 33 bp, synthetic construct
  source 1..33: mol_type = other DNA
accattgtgagcggcccggttgcggtagccgtc

SEQ ID NO: 77031 - DNA, 63 bp, synthetic construct
  source 1..63: mol_type = other DNA
cagattgcattcatcttttcatattcggaaagctccgcgcaactggagccgttaattgccagt

SEQ ID NO: 77032 - DNA, 357 bp, synthetic construct
  source 1..357: mol_type = other DNA
cagcatcttaacgtggtcgtatctggttcgatggaacccgccttttatcgcggtgacattgttctggtggaaaaggcggacttctttggcattcatgagttcaatgcaagtgatgtcaaagtgggtgatgtcgttgtgtatgatgcggcttggtacaaccagccagttatccaccggattattaatattacagatattaacggaactacgatgtatgtgatcaaaggcgacaataacaatgcccctgacccgtactatgtgacctcaagccaaataaaagaaaaagtagtaaccgttgatgataacctggtcgttatcccgaaaatcggctacttgtccctgtggctccgtgggtta

SEQ ID NO: 77033 - DNA, 1098 bp, synthetic construct
  source 1..1098: mol_type = other DNA
gcaaattggaacagtttcgctgggggcgtggatcacaacgcgttccgtgaagaaagttcggactttgtaacgaatctgtggacgttcaatatggaatccccgattcattcatcgccggcagtgtataaagattttatttatgtggtgtctacccagggtatcctgaaagtcatcaatatggaaacaggagaaaaagattgggattttgatctcgaaagcaacaccaattctagcccaatcattaacagcaacaaactgttcattggcaccgaggatggtattaaagcgattaatatcaacaatcataatgagatatgggattatgattgtgacgacgttgagagcactccctttctgtacaaagacacaatttacttcggcagcgatgacggtcatttatacggccttgataaggataacggcaaggtggtcttcaacaaaaaactggatggagaacttaaatcctccccaattgtcgtagatgataccatttatattggcagcaccaactgcaagctgtacagtatcggaactgacaaagataaaaactgggagtttactacgggtgatgaaatccttagcagcccgagttttatcaatgacaccatcgttttcggcagcaacgacggcaacatttattgcctgaacgaatcggacggggccttaaactggaaagttgatctaaataataaagtgttgagctcaccgacggttgataaccacgacaataatatctttataggttctgacgaaggtaacctgacgtgtattgataaccgcgatgggaccattaagtggagccattcagttggtggtaaaatccagtcgacccctgccattaaggacaatctggtggtttttggctcggacaacggtaatctgtacgtgttgaacaaatatactggcagtgaagaatttacatataatccggggaccatactctttaattccgcgatcaactcatcccctgtaattaatgggaacagtttgatctttggcgatgattcgggcaacgtctattctctgaatattgataaacacgaggtaccgggttcaacgcaaatgtacttctccatttctgtgttaatcatcattgtc

SEQ ID NO: 77034 - DNA, 450 bp, synthetic construct
  source 1..450: mol_type = other DNA
ggaatggggggcgaaatgacagacctgccgattcttgttgtttcacagagtcacggcaatctgactgatttgaccctggacacgattaaaaccactgaaacgtataaggtaatcgaggtgattgatgatttggatgagggtaaaaaacgtgtggattcgggcgaagtgaaagcagcgatcatcctgccgtctgattatgacgataacagcacccagcagaaatcggtcaccctgtatctggattcaagcgatcaaatggcttcccagattttagactcctcgacacaggccattttctctcggctcagcaacatggtagcctcccaaacgaacgtcgaaaataaagacgcgaacattaatccaagtataagtaatagctttaacaactttaaagatgatatcagcttacatatcaatcgcatctacggtaatattaagtacattgacttc

SEQ ID NO: 77035 - DNA, 114 bp, synthetic construct
  source 1..114: mol_type = other DNA
tatccgattgaaaccatgccatggattttgcagaaactggcgtacatctttccgctgacttatctgaacgacgccatgcgcggtatcatgcttaaaggccaaacgttaggggat

SEQ ID NO: 77036 - DNA, 60 bp, synthetic construct
  source 1..60: mol_type = other DNA
atggtgtataacgaattaatcaacaacatcaatctgataaatattaataacattattagc

SEQ ID NO: 77037 - DNA, 426 bp, synthetic construct
  source 1..426: mol_type = other DNA
agttcatatacgatcgtcactgcggaagctccgaacattcagggactgattgacatgcaaatccagaaaatcagcagcattctgaacccggaaacggttaacgaagccctgataaaagatccaacccccatcaatattaccaataaaaaagatgttgcacttaaaatgcaagacttgtctaaggtggatggtgtgaatgtggatagcatgaacatctcgacacgcgacaatccgagcaacgataaaaactttacggtaatcattgaggcgctgggctacgcgtcccctaatagcacttcaggccagattattattagtcaggaaccatcctataagattatcgcttctgcaccggcctcgtaccgtggtgaggggatcatggccgataccaatagtatgacaataacctccgtcttaaaactctat

SEQ ID NO: 77038 - DNA, 36 bp, synthetic construct
  source 1..36: mol_type = other DNA
atgacctttttcctggaaagctttccgggcttactg

SEQ ID NO: 77039 - DNA, 39 bp, synthetic construct
  source 1..39: mol_type = other DNA
tcctcggtggaaaccctgctgagcaacccgagtttattg

SEQ ID NO: 77040 - DNA, 39 bp, synthetic construct
  source 1..39: mol_type = other DNA
agtattagctttggcaccatcggggtgggtttcgataaa

SEQ ID NO: 77041 - DNA, 783 bp, synthetic construct
  source 1..783: mol_type = other DNA
tcctatgagaatataaccgataaactgattaaaactcaggaaaaagaaaatatggaaatcctcaccagcgagattgtggacaacttaatcaacaatcctggcgtaccggaaaaatggtttgaatatggtaagggaaccccgggccttgcgatcattaatgagggtggtgaaattattccaaatagcgtgtcctattcgaagttaatctcgcttaaagaaaactataaaaaactggtagatgatcagctgttcaaatctaaatttcattcctcaatggaactgatcccgcagaagcgcactattagcagtgtaaaaattgggtctaacagcgagtcaaacaacatcttcagtgtgaaccggttggtcaaatgtgatttttacaaaaaatacgttctgaaagactttaaaaatgacggcaaatgcaaccacaatcacgaccagaaatatcatagttgcaattattttaaaatttttaaaggcaacctcaaaaactcagattactacctactgatcgaggatagtgaaaagtacgatctgaaatatattgtcgacaccacgcgtgttgttaaagaaaagtattgggaaaatgccatatcgaataaaatttacctgaatgacaaaattaacttctatgatgatacgagcgcaatcgtcttcattcattttaacaagccgcaatctaaggtggtgttggtgagcgttcccaaaaactttgataagaataaattaaattatgattacttcatcacaaacgaatgtcaattcgttctgaaagtctggtac

SEQ ID NO: 77042 - DNA, 849 bp, synthetic construct
  source 1..849: mol_type = other DNA
acgtcgataaattacattcagaacaaaaatatcggcatcgaaagcaacgataacttcaaatacattatcgacgattatacacagaacctggaacttaattgccgcgacgctatcgatgaagcaacccaaaaagtctttaacgggcttcccgtgacgaacagtgaaaaccagattaaaaagaacttaaacaaaatcctggataaaaaaaataaagaatatgaggaaaaatacgacgtcaaaattaatagcgaaaccttgtctgttgagaataccaaatcaccatggaaaatactgttcaaaattaagctcaacatcaaaaagggtgatgagaaatatagcaaaattgtggaaaaaaatgcaagcgtggaaggtcttcgggaccccctgccgatcgctaaactcaccattatgtcgggaattttgacttatgataaccaaattcattacaaaactgcgctgtccacctatatgctgctgcaccatctggattcgccggaatcatatattgaggccacagcgccattatacattaaaaaatgcccgtatgatccgtatatccatcatggcgaccctggagtgattgaagactgtctgaaacacggctattttcatgaaagtgcggatggcagttgttacctgtgtcgtctggaaggcaagggtaagtgcccgcactatggtctggaagtattcatccagacgcatacgcctctaaaaaatgagtctttgtcctgcccggatcacgttgtatttgccgaccactacaacggtgagaagatcaatccggatgactggaatagcctgattttagattcctctcatcgcaagaaatacgggttgatcaatgatggc

SEQ ID NO: 77043 - DNA, 75 bp, synthetic construct
  source 1..75: mol_type = other DNA
gcgtataacgaagaagagaccgtggccaaggttgtgaatgtcgttaaaaaagtaagctttgtggatgaaattatc

SEQ ID NO: 77044 - DNA, 93 bp, synthetic construct
  source 1..93: mol_type = other DNA
aatgacggtagtagcgataacaccgaaatggaagctctgaaggccggggcaatcgtgattaatcatgaggttaacaaaggcaaaggcgaagcg

SEQ ID NO: 77045 - DNA, 99 bp, synthetic construct
  source 1..99: mol_type = other DNA
tataacctgacgtccagtaaagtggaatcaatgattaaaccgatcttggatggtggcgcggacattaccaagactaaattttcgcgcgccagcgggcgt

SEQ ID NO: 77046 - DNA, 141 bp, synthetic construct
  source 1..141: mol_type = other DNA
ggcataagcattatggaagtagatattggcgcaatcgagcatgacatgtcgccgctgagtgatttaaacctgatggccaatgaagttgtccggacgatcatcggtcgtgcgaacaaatatgggcgcgtgaccatgattgat

SEQ ID NO: 77047 - DNA, 681 bp, synthetic construct
  source 1..681: mol_type = other DNA
ctcggtgccgcccattttgatcacggcgttctctccattgaacccaatagccgtaacctgattatttatgcagatgatagcccgcgcgacaccatctcggttcgcggcccatatacgatcgatactgcaattgagaacgaatctggtcagatacgtatgccgtctgacgcgatgatgaccctgggcgtcaacatcaacgatacgattaaattaggcgcgaatacctataaagtcaatgaaacccgcctgggggagcctgacatcttacgactaccgatcgaagtaaaaaagctgttgcaggtggaaaacggcgaagtgattcagaacagccgtcttaaagatgtctttgatggttcgctgattacgcacgcttatgaatacaataacacaaccatcaaagaaaaatattttattacctcaaacgagaagcagagctcgacatacgaaatattccttgataatgagagcatcgtgaacagttacggtacctttaaggacaacggaacgtatgatatctctgtagatgggaattacctgacgagctttagttacaaaaataacttgactaaatcctttaaatttgacggccatgacctggaaattgtgttccgggatacaaattccacttcaattaaacaattctcaagtggaaatcaaggtgttttcctgaattttaacttc

SEQ ID NO: 77048 - DNA, 378 bp, synthetic construct
  source 1..378: mol_type = other DNA
gggtttttcgatttcctgcactgggatgacgattccgacaacattaatgtggtggaggacggccagtattgcacagtgaatcaggtttcggcgtatattaaagaatttcacaaattgccgtctaattatatcaccaagaaagaggcacaaagcttaggttggcatggcgggcctcttaaaaaatacgctccaggtaaaagtatcggtggcgatacctttacgaatcggcagcatatcctgccggattcagattataagtacattgaatgtgacataaacgcgaatggaaccttccgtggtgccgaacgcattgtttacaacactggcaactataaagtatactatacggatgatcattacaacacctttactgaagtc

SEQ ID NO: 77049 - DNA, 60 bp, synthetic construct
  source 1..60: mol_type = other DNA
atgattatcgtgtacggtaaatatagcatttatctgctggggggcatggagatgttagaa

SEQ ID NO: 77050 - DNA, 45 bp, synthetic construct
  source 1..45: mol_type = other DNA
aaaacgaccttatttggtccgattggcgggcatctgggcttcttt

SEQ ID NO: 77051 - DNA, 33 bp, synthetic construct
  source 1..33: mol_type = other DNA
tataacgcggatctgagcagtttaccgaaactg

SEQ ID NO: 77052 - DNA, 51 bp, synthetic construct
  source 1..51: mol_type = other DNA
ggcttagtggatctgcagtataacgttagcattatcgaagcggccatgccg

SEQ ID NO: 77053 - DNA, 84 bp, synthetic construct
  source 1..84: mol_type = other DNA
tccatcccgagcatttttgaaaccccctcggtgagtatcctgattcctggcgtcgatattccgggttcacagatatatgttcca

SEQ ID NO: 77054 - DNA, 324 bp, synthetic construct
  source 1..324: mol_type = other DNA
attggtattccgcattactttgccgaagacggtatttcgatcgatcgcatcgtttccgactcccctagtgagggcatactcaaagaaggtatgattttgcaggctattgataaccataaaattaatgactctgaatcatatgtcaatatcgtgaaatctttcaaacccggggataacgtaaccgttcagacgaatcagggcagctattcggtcgtgttaagtaaaaacccaaacaacgatagcgtaggctttttcggcatccaagcagcgaagcactacgtgcttctgaatgatagcctgggaccgatcccgtggattctgttt

SEQ ID NO: 77055 - DNA, 45 bp, synthetic construct
  source 1..45: mol_type = other DNA
tcccgcagtgatcgtgtcattgacaacgttgtgagcggcgaaacc

SEQ ID NO: 77056 - DNA, 39 bp, synthetic construct
  source 1..39: mol_type = other DNA
gtgccgaccctggcgagtgaatttggcatgagcaacatt

SEQ ID NO: 77057 - DNA, 33 bp, synthetic construct
  source 1..33: mol_type = other DNA
tatcatctgcagtatattcgcggctacgatagc

SEQ ID NO: 77058 - DNA, 54 bp, synthetic construct
  source 1..54: mol_type = other DNA
gtgatgggcaacgttccaatgatcgaaaaatattttccgctgttaattaccagc

SEQ ID NO: 77059 - DNA, 90 bp, synthetic construct
  source 1..90: mol_type = other DNA
ggcggtctgtgcccgaccgatgccagcgtcccggcgtatgccattactgcgaaagctatcgcagttgcagaagggaaagtgacgatgcca

SEQ ID NO: 77060 - DNA, 33 bp, synthetic construct
  source 1..33: mol_type = other DNA
tttctgggtgcgaaaggcgtgacctggactacg

SEQ ID NO: 77061 - DNA, 54 bp, synthetic construct
  source 1..54: mol_type = other DNA
tgcaacgcgctggcctttccagtgagtaccggtccgggcagccgcatggcacat

SEQ ID NO: 77062 - DNA, 285 bp, synthetic construct
  source 1..285: mol_type = other DNA
ccggctgccgacctgcctttaattaccgatgaagcgaaaggagaatatgtagactccagcggtctgccgtattttagcgaaatggattcttactataacctccgtttgactgaggactatattgatcatggttacgttggcgatcaaatcataaatgggagtgagtgggatatgcaccgctatgcgccaacgggtaaccagattaattacgaacttggcattgtgtacgtgacctcgttcctgcatgatatctttggcggcgaccactcagtccgggaaatcgca

SEQ ID NO: 77063 - DNA, 174 bp, synthetic construct
  source 1..174: mol_type = other DNA
gggctagatggtgttaccggattattcggcagcctcttatcactgcttagtctgcaaagcgcatcgcgcgtcgtgggcggttttccaaatgtactggtttctgtggccgaaatgcagattccgtccatgctgggcagcggtatgaatagtttgtttctggcgaacacgaacggc

SEQ ID NO: 77064 - DNA, 1008 bp, synthetic construct
  source 1..1008: mol_type = other DNA
ctgacctcagaatctgttgtgccgggcacgagcgattccatgtggaatgcaatgacttgggttaacgaaacgcagagtgacgatacggtactgacctcttggtgggactttggttatctctttgagatcgcggccgacaaacaggtgaccttcgatggagggagccaatctggagaccgtgcattttggcttggccaggccatgaccacggataatctggaattgtcggcaggtatctttcgtatgctggatacaacaggtgataaagctgtggaatcactggtgaatattaccgaggataccgggaaatccgttgacatcctgattgacattttaccgatgaaaagcgatgatgcgcaaaagacactgcaaagtaagtatcatctgaccgcggctcaggcaaatgaggtagtccaatattcacaccctaaaaacccacgccctgtgatattcgtcgcctcgtcggatatgctgcagaaagcgggctggtggagttacttcggtgcgtggaacttcaccaaccagagcagcgaaaactacaactactatgttccgaccgagcaggttaaagttaatccgggctcaactggtaaactggccttacttgacgatcagggtatgacggtcaatgccgtaatccaacgcggctctggcaacaatagcaccactgcatatacggaagctgtttataccgacagcggcaaacagattatggtgaatgataccccatataatccgttgaatatttccaacctgatggtgatcgaagatggatatgtcatgaagaaccagtcggtgggcaacgtgaaagatgccaactacacactccttctgattggtgaaaagaatcagtacactcccatcctgatgagtaacgagctagcgaactccatgttcactcggttatacctctatgggggcgccggtcaaaacatttttgaaaatgtccatacggaaaacggcgtgatgttgtttaaagtaaactttaataatacggctgcgggggcg

SEQ ID NO: 77065 - DNA, 6153 bp, synthetic construct
  source 1..6153: mol_type = other DNA
aacactactaacagttccgatatctacatcagtaatgagggtagtgatttttgcggcgacgggtctatcgataatccctatcaaacgcttaactacaccattgggaaagtcagcaacaactcaaatatctatttaaagagcggcacctataattcgaccggttatgatattgtaaataaaagcatctcgattaacgggattggcgatgttacgatcgatggcctgaacggctttattagccagagtattttcaaaattaactctaacgcctcattatttttaaacaacattaagtttaaaaatggatattgtgatctggacaatgagacgccttcgtgcattataaaccagggccgattgttcattaccaactccacatttgacaacttcaaaaccagcgtgggcgtaattacgaatgaaaactatctgtgcatcagcaatgtcaaaaccagtaatttgtccaattcgcagctgttctccgctccatacaaatacaacatcccgattcaattcatttacaacatctggtgttgtgatatttataacagttcgattggcgcatcgtacaataataaaaacatgacgctaaccaattcctttattgagcgttttgtgtcaaacaaggactattcaaatcaaacgagctatgcgtactttaataactccaacgtgcatttaatcaccgctaacgattgtgacatgctgattttcaataatacctatattaactgttatttcgacgttgacgatacaactcataccattgagtacagcaacctgatttgggataatgtcaccctctccaaatataacgacctgttctatttttctttaaaaatcggctatagcaatctgaccgcgatttcatcctacttcttaacttcgattctgttcctgtcgagcaatgcaaccatttcatatagctgtattctgagcaatattattacggcggtcgtgtcgaacgtcaacgttaactacaactggtggggggataataagggccctaatgtcatgaacggtgagtttagcaaaatcacgagcaactactgggtcgtcatgatggcggattatgatgacagcctggtgaaaatcgatctgagtaaatataccaacggcctggatgtatggaatctcaataatccctcgaaactgcgcactcgtctggtgaaactgcgcactgaaacgggtaatctcaccaaaactagcggttacttggaaaatgctacgttttacagcgaactgaacggtaataacattaatacgatgctttacgcgatggttgataatcaggtgctcagaattgttgttggtgagggtaactctgactatgacttatatatttccgatacggaagggaacgattacttttgcgatggctctctcgagaatccatataaaacccttaagaaagttgtgtccaaagccattagtggaaataaaatttacatcttgccgggctattatacgttaagttggaatgccaacatcaaaatactgaaaaacttaacatttatcggtattggcaatgcaaccctgtcaagaagcaatgcgcggaatatcttcattgtgcaggaaaaaggtgtgttgaatatcgaaaacctcacctttacccaggcgacgagcggctaccacaactactatgatccaatcattcatgtcattgatggtgacgtaaaccttaagaatagtaacttttataacattaccacgtacggggtggtttttagcgataaatctgaacatgtgactgttaacaacctgacgcttctaaacgttgaaggtcctgttgtagtgggtaactctacgaaggtatccatttataactcgaagtttttcaatggaagtgaagcctccttttatgattcatattatagctttctcatcccggtttgcagcaacctgtcggttgtaaattgtactgtggatggctataaaggtggtctgatcaaactaaacccgcgttatgaacagatagcggcacgctcatatatttataattccacctttttgcgcaattaccagtacaattacgtgtacgcgccgatggtcagcacctactcatataattacatgacgggatttagcatcatcgaaaactgcacgttctgcaataacattgggaacttagtgttcagtaatatcatcaacaactgtacctttgtcagcaataaacgcattcgttacgaggagacgaacatacattacaatgtcaattatcccaaagcgctcatctatgcaaaaatcattattaattctaatttcaataataatagcttcatctcgaaaaactatgaagacatggtcattcatggcgacgaagtgtactatagcaccttcatcaacaattcggccgcatttggcggtgccctgagcggctcaaaggagatacactatagtatctttatcaataactctgccgcctttggcggcaacgatgtattcgtgtataatggggacctgaactgctcgagcaactggtgggggtcaaatcaaaagccggattcatctcgcgtttttgtgttcatcggcacattggtattggatgattgggttatcttgactatggactacaagaatgatcgcgttattgcctatctggataacctgctggacaataacggcaacagttatccgctcaatcacgttctgccaagccgtgcggttattttttccactgaaggcggcgaactgactccgtcgaacacttttttggttaacaataaagcgtcaacgtttctgatccggctgacttcgagcgattttaacgtatttgcgcaggtcgataaccagattacaagtttgactgtgtacaacaacacgacgcagatcctgatgagtaacgtggtcatctatgggaaagatgtcttgtataatttgtctttgataaatatcaatggccacaaaattagcaatcaggatctgaatgtgatcatcacgcacaaaaactcaattattgactcctttattgtcaccacagacaaaagtggggatgcctcctttagtgtagattacgccatcggtatttatcaggttaatgttgtgtatctgggaaacggttacttcgaggaatgtaactcttcagcgacgatcaacgtatcgtctattaaaactaaacttcagtcttataaccagacctattcaggtaaaaataacaaattttatgccatcttggtcgactatcatggccggtatttgctcaatcgtgatctgattctgaggatatttgacctgaacgacaatctggtgaacacagtggacgttaaaaccggtgtgggtggccgtgcagacgtgctgctgagcctggacgtgggcaactataaaatgaaatgggattatctgggcaatgaatggtacgaaaagagcacttgcatctcattcgttaccatccgcccgattgaaacgaatatcatacttccgaacacaaccctgtatggcaaaggcaacgactatgagttcacattcaaagacatgtacggcaacttaatctctaacgaaatgatcacctttaaaatctccaaagagaacgagtctagtaaatttagtcttatcaccaagaaaggcattgcatcaatcaatattaatctacttccaggcaaatacgatctggaagcggtgtacgcaggtgataaagtctacggttcttcattcgcttctgccatcctgtatgtggaaccaattttcgtaacaatgaatcacaattcttaccaatccctacctaagaatggggtgttcacggtgattctgaaagatatgtatggaacgaaggtaagcggtgaaaacctatctcttgaactgattaacaaagatattcacaaagtgtacgaggctgtaagtgacgctagtggccaggccaatttcaaactcgatgcaccggaaggcgtgtatttcgcgttaattaattacggcggtaacatttggtatggttcttccgtgagtgctgtgactattgaaattaatagcaacgtgcctatcaacccggtttacatcaacggtagcaatctggtccaatactacggtgaagacaaatattatttaatcaagttcaacgataccaacgcctacagcctggaaggcaaacttgtgaacgtgttaatcaacagcgaggattggtcgaacagctacacgcttgaaagcaatgtctttggtgaagctcgtatccaaatagcgttggaaccgggaacgtataatatcacttataactacaaaaatgaatattacggtctgtttgctcaaaactccagtactatattcgtttacaaaatgcctaccagcttaatagcctccaacatgattttaaagaaaggcgatagcaaaaatctggaagtgaaacttgtcaacaaaaatggagatccgattgctaacctccccgtaattatcaagatcgatgataacgagtacaacataaccacgaatcaaaaaggcattgcgaaactgcttcttaacctggatttgggcacacataacgtgacctacagcttcaacaataaaaactacatctcttcaaaaggtaatgtcactattctggtggttaacgactcgaaaaaaaccaccacactggtaggcaatgacgtttatacgcgtgaggaccaaacaataaattatacggttctgctgtcggacctgttggacaacccgatttcatcttcggaaattgttctgaaaattattaattccgatgatattaacatcaaaacctataaaggctataccgatgtaaatggtgttgcgacctttaagtttaacttaaaatttggtaactattttgtgaacgcgtattataacggaaacagtgtaaatctgccgagtttcacgacgaataacctctacattaaagtgctcgaaaactacacagagacgatcctgttcggcaacgacattgagattcataatgggggagatgattactacagcgttgttttatcgactgtggatggtgaatttattaaaaatcagataatcgaatttatcattaaaaacaattcgtatttcaccaataccgacgaaaacgggatcgcgtacctgaagatcccgttttctcccgggagctatgaggtcctcactaaatttcatggttgcgataacctgaccagttcctcaattcacaactacattagcatttatggagatctgtttaatttttactcaaaagatgttgtgaaggcctataacaatggtacccattattatgtggcactgtacgataccaacaacgaaccgttgtccaataaaacaattaacttctatgtcaataatcagacatatcaggacgtgacaaacgcggatgggttcgtgtgtttcgaagtatggctgaatccgggcaaatacatcattaacgcaacgtttaaaggcgaatatccggacgaatttaccagtgtggtcaataacatcaccgtcctgccaaccattatgggggaaaacttagatgtgtattacaacgaaaataccgtcttttcactcttcctgctggattataattgcaagccattagaaaataccgaagtagtaataacaattggtggagcgaaatacagcacgatctcgacttttggttccgcaagttggaaactgaagctgaatgcaggggtatacaacgtgatttgcaagaatcctataaccaccgagaaaataactcgtaaaattaatattaaatccacaataatctcgaaaaacttggtaaaatattataaagggtcgagcaaattttcagtcacctttaaagatcgcttcggtaatttttcgcgaaactctaaagttaagttcatcattaacaagaagacgtatgttaaaaccacaaactctcgcggtattgtgtccctgaatatcaatctgaaaccgggaaagtacaccattaaaacgtataatctgaagacgggtgaaattaaaacaaataaaatcaccatcaagaccctgatcatttccaaaaataagaaagtcaaagctggcaaaaaaattaactacaatgttaaagtcttcaatagcaaaggtaagattgcgaaaaaagccaccattaaattcaaaatcaaaggaatcacctacaaaattaaaaccaataagaaaggcattgcaaagctgaacatcgttcttaagaaaggaaaatatacacttaaaaccagctattttgggttaagtgtgaagaataaaatcactgttaaa

SEQ ID NO: 77066 - DNA, 5574 bp, synthetic construct
  source 1..5574: mol_type = other DNA
gaaaactcaaccctgaacacctctattaagatcaacaacgatttaaaccaaatcaatctgggcaacgaaataaatctgatcgatgaagcgccaaaagaagttttacaggatgaaagcgaaatttccatcacgccgcagaactataataaatattttaatgtctatactggtaaattcaaaagcgatattgtcagctctaaaataactacggtgaaaatcggtaatgtttcaaaatgcctgtttgcatttgaaaaaccggtaaacctgatgccgatcgattcgagctgccagattacaaatggggtcatccatctgttgccgggcagtgacggctcgaccatttccggcttaaaaattatcaataacgattcggtgggggatattaagtatggaggcattctgatttcgcgcgcccacggcatctggctgaccaactccagtaataacctgatctacaataatacaattatcataggcaatcagaagggctgttacgccatgccgatgggttattcgaacaataatcgtattttgaacaacaccatcattagcggtctgacgtcttgcatcgtaatgggccgctcgtgttacaacaatatttcgaataattatattgaaatctgcggctatgaacttttcactacctctaacttaattttcttcaacccttggggccatgcagattatgatgacggggtagccgagtgtaacggcaactatattgccaacaactatctgaaaaactatggaactggcatctgggcgataactctgagccttggatactactccggagatacccaggtcattaataacaccattattaaaggttcatcaggcatttccacgagtgacatgctgttcacccaacccaaaaatatcttgataaaagataacacttttattgactgtcccatctcgatccttacctgtagcaataacgtcacaatcgaaaaaaataaaatttttggcagttcggaagacaacgccatctatattcaggcgaacgatgcacaattgtataatcatagcgtaaccatttcggataattacatcgaatttgaaaacctgggttgtgcgatcctcgtccacagtgacaatgtaaccgttgtgaacaatgagattcatctgtcccgctatggtacgggcattgggattagcccaaccgatttcccgaaagcctcatcgaataactgtaaaatcgagaacaacaaactctatctcagcggcgatatgggcatccgcatacttggacacaatacaaccatctgcaacaactacatctcgactaaggacaaaggcatcgtcatctcatcttcgggttacaaaatctataataacactataattgcgaatataattctgagcgatgacgtgccaatctacattgaaggacacgtggtaaacagcaccgtaatgtataatgagatcgagacgaacaatagtgagggtattcatttcaacccgagcggtgatctgagtgactactttggcaaggttagcgaaaacaccatcaacggaattattgaaaatacggagaccatcattgtgaatgataccaacttttacgactattttgatctgtccggatatctgaactatgagttcaaaccgaactccaaaaaaattatctttttcaccttcctgacgaataaaaatatttatttcaccgataaaatctttctgagtagtaacaaaatgtacaatttattgcataatgtgtcgattaaatttttcgaaaacgccagcggaagcctgatccaagacttaaacttttataatattgggaacaatagtatcattttagatggggtgaatgatgtgagcattaacaacaatgacttcaccatcctgagcaacaagggcaagaatatttcaaccatctccgtgattgggggtgaaaactgcatcatctctaataacaatattttcatgaactcgaaaagcaatttcacgaccgcgatctctatttccaatcctaacggcgccatcattaaaaaactgtcaaaaaactttaaaattttcaataataacattctgattaaaaccaatggcatcgcaaggggcatctacgctgactcacttgtggagacaaatatactggaaaataagatcaacattatctctgacagctcggcttatggtatctcaatcgaaaacaccaatgaaatagtgtataacatcaccattgacaacaacctggtggttattaattctaaggaaatgagctatttaatcaaacttcaaatgattggcacgagcgatatcatcaacaactatctcgtgggttcaagcaatggcatttgcggtatcggtgcgtacaattctttgaacctgaacatcaatagaaacgaaatttctatttcaggcaaaaaaccaattaattttcctgtttttgatgaattaggtcgcaataacgtggctatttatctgaaatccaccgtaataaatggttttagccgtaatatttttgacatcgaaaattcaacaatattgatcaaagacagctcatcgatcattaagaatttcaatgttaatagttatgttattgccgactataaccatgatttctactttgactcgcaaaacaaactcaaaagcaacattattaacgataatagtatcatcttatttaaaaacttcacgtttaaaaaaattaccaatattaatattccggtaattataaaaccatataaaaatcttaataacttcacggctacactgatcttatcggaaaatgcgaacaaatcatccatttatggattcaacttcattaatgccaatattaacttaaatggcgtagataatgttaacatttttaacaactcgttcaaatgtagcgaaattacggataacaatggtttgaataatattatttttaacaattcctttgaatttaaactgaataacgcagacggcattatctttaacggatgtgcaggaggcatctttaccaataattatatcctaattgattcgaaaaaatctaattttattcttattcgaaaagcgaacggcacgaaggttaataacaactacatcaatgctacgggtgatagtctcgtcctgattaaatcagactcgtcagaaaatacgcagattctgaaaaatattattaacgttacctcgacgggcgattttaacgtgtataatgcgtttaaaactcactttgataatatttcaaacaacgaaattaagtgccggggtacatccaacagtgcggtcatttattatgattctagctcgtcatgcaataaaattgaatttaacgaaatcatttcaagctctagtaatggtcgggaatacgccgtggtgtttgataccaaacacgcgctgtccaatacgattgcgaacaactatctgattacgtctaacgggtaccgtcgtggcaatgatgccgtatacgccatcttcgaattggtctgcaacaacactccggtaacgatatatgtcagcattaatagcacggaggacggtaatggtagttttacaaatccgtacctgaccatccatcaggccctggagaacagtctgagtggcgctatcatctacatactgcctggttattacaaggaatccaacctcattgttaacaaaaatattacactgaccgccatcaacaacgacggcgctgtgtacatcgatgcactgaataatcagctgtttacaataactgaaaagggcagtttgacgatcaatgcattaaagattttcaacggcttcagcgtggagggtggaagcttgttcttcaattttggtagcctcattatcaacaactccgttatttataacagctctagctattacgacaattccaaccccaccttcaaattcaccaacatacaaacgccaactctgtcatacagttacgattgtgaaaatctgggcctgggcggggcgatccttaattatgggaatctgctgatcaatagctccaccctatttgataattttgcccataagggtggcctactggcggattttggaaaatccacaattaaaaactcacttatatttaataacacggcagttcatggcggggcaattttcacagattcatctcacgagtttaacattgaaaacagtagcttcttagaaaatctggcgattcagaccctggattactgctatattcagcgaaaatcgttggattctggcgggtatgagtaccgtagtctatgcgacatgcggccgggatatggtggcgcaattttcagtaattcttccctgatcatctccaattgcctttttgagcgtaatattgcgaaatctggcggcgcaatcggtcactacagcaagatcgaattgaacagcaaccgccaggggcctaattactacgcggtgaatcagaatgtttacagtcaatttcgctacgtgccgaagttgaagattgaaaactcgatctttcgctacaacgaagccaaggacaccagttgtggtaacctcagcatgatctcggatcgcatgtataactattactacagcatcaactataacggcggcgctattttcggttctttaagccagctgaccatctttaacagcctatttgagcataacgtggcaaacactgtgggtggtgccctgtgtgttcagtgcgaaaattcagtcattgagagttgcaagttttacaacaacacggctggggaatacgggggtgcgattgaggcgtttggtacttaccgtatctttaatactgaaatccttaataacaatgccaaaaacggtggggcgattaaatatacgagctataactcttatggtcatctgcaggagatgatgagtctcttcaatgtcaccgttacgggcaacaaagcgctctctagtggcggtgcctttattacacaagtggcgaactttgctatcaccaattccaacatttatgataatagcgccccgtatggtaacactttttacggaaaatatgggtatgatagtagttccaacattgacgcgcgtaataattggtggggctcggtggatggcccggacgattccgtttggaatagtgcaaatagcaaatttaaaaactggctgaacgagaaagtgaattggcacgttccgcatgtgagcggtggcagctctaataacgacgagtctggtattggcaatcagaacaatggcgtaaactcatatatcccctctagcgtctccacgggttcgggggtccacacaggttcaacactcaccaacaatgttaagtcgtcgggtgcgtcttccaaagggttctcattcactggaaactggccttccggcaccgcaaacggtttcaacaatggggggtctggtgaaggtaacgcggtcaactccaaagataactctggcaatagccgtacttccattgcaggcaacgtgaaaaacttgaacagtgttagcaaaatcaacagtagcaatgtgaacaatctgttctcagtcggtatggatgcaaacgctgcagactccagcgctagctcggcgtcaagcagccaggggggggcggatgagagtttttcaaacgcctacgagatcattaatgaagtgaagaaagaaaataaccagaagttctccatatttaatatactgcttatcatagct

SEQ ID NO: 77067 - DNA, 5184 bp, synthetic construct
  source 1..5184: mol_type = other DNA
gccagcgaaatcaccttgaatgcagataattctatcgatgagatatcgaacgaagatatgggaatcctgaatgaagtgtcacccagcaatgacatcaaacatatttatgtcaacgacaccggggacgattccaacataggttcaattaatagtccttactcttcaatcagcaaagcaattggtgacgttaactcgtcgaccaacaccacgatctacctcagcaagggcacgttcggcaaaaacaatgataccaacttccaatttaccaacgaaatcaacacgtattttgataactgtaatgtgacctttattggtgagggcaccgataaaacattcattgatgggaaatccacatataaattcatgaccatactggaaatcacgcctaacctcgtttttaaagacatcacctttgttaatttccgtggccgggggagtagcgtgtttgaacttttggaggcgggcaatttaacgattgataattgcgtgtttaaggattcatattctacgagtaacggggataccattagctcttcaaacagcggtgatctcaaaattattaactcgcagtttattaattcaaatggtggaatcattagcctactgtatgaggacgtatcgcccggaactctgtatctcgaaaacaacacttttgtaaatattaccaactctgagaataacggcattgccgtgaccagtaattatgcgaaagcagtgattaaaaacaataaatttaataacatcacgtgcatcaaccagaatcaggttaccctttatctagaagctcccgatgaaggtacactggttctgaccgataacaactttgtgaattgtgagtgcctgaacgagtatttcatggcgcccgtctacttgtgggcatacgaggaatacgtcatctttgaacggaatatcttcctgaactcgactggtgcgtccggattcaatatcttgcttaacggccgcatggataacctgaatattagtatcggtgctgacgagattaatgtgcataacaatgagattaatcatggtgtcaacattccaatcaacataacggatgatgtaggcaacctcgttttaatcaatagtggcatccagctgaaccttatcggtgacaacaacaattataccccgtacctgagcctgaaaaacaaaaagctcacatttgcgaccgttcctgagagcggcatttacaatgtcactatcacatataacgatgggctgtcaaccacggaagtgctgaccattatcaaaatcaacatctcgagtagccctgtgaacatttgggtaagccctaaaggttcagatagcaacaacggtagcgaagaaaacccgtttaagaccattcagcacgcaatagatacgggatttgaaaaatccttcaacgtcatcatctacctggatgaaggaatctattacggtgagagcaatgttaatctgataattacgaacaaaggtagtcttcaaattatcggcaaaaaatataataaaaccattattgatggggaacatagcaattggtttttgagcgtggatacttgtgatgtggaagttaaaaatctaaaattcattaatggtgctggcaataagaacctgatttctggctccaatctccttaatcttaaagattgtattgtagatagtaacattgcgtcccgcaattgctatgttctgcatcagacattatttgataacttaacgtacaccaacaatactggtacaatttactataactataatcgtaatattacaaaatcaaattttatcaacaataaaaatatttatgattctactggtatcatttatagctcgtgggcgccgataattattcttgactgtaaattcattaataacacggccctgtatgactatggcgtaatctactctaacaacaacattatgagtctgaataattactactatggcaataaagcgaagaattatggcatcttctacgcctcgtcgtactctagtaataaaatgattctgatcaatgatacatacattaataatcacgtcgatggcagctatggcattggcatttccccatattcctctgtcgtcaactgtaaatttatcaataacagcgctgggacagatgcgggcataggcagtatcaccatcacctgtagcttcaaaaactgcagcttcatcaacaacagcgctactaagggcggtgtttttgtcttaaacgctgtgcaacacgccttgggcacgacgtacgaggagcttatttcattcgacaatgtaaccttcgaaaacaacaaagcgagcatgggtgctgatatttacctgcctccgcgcagcagcaactcctactactcctatacgtatccgattgaattaaccattacctttgataatattactgttacgtccctgactgataacttaactgcgagtgtgtacggcgtgaatggcataatcgttggaggtgcaattcttgaattttatctgaacgagctgtacattggttcttcgcaaattgttaacagtaatgcaattttagaatatgatggttttagtaatggaaaagctatcgtgaacggcaatattattcatccgtcggtaaaaaacaacataaacaatgcaacattagacattaaactggacaacgtcttaaatcatattgatttctgggtgtccaacatcggtagtgatgaaaatggcgacggtagcaaaacgaagccatttaaaacaatccagtatgcggtgaacaaagcctttgaaaactgccgtgacattaccatctatcttggcgaagaaacatattcgggtgagaacaacactaacctgacgatttcaagtgcaagcaacatcaccataattgggaaaggaattggtaaaaccattatcaatgggggcaatagcagttatttcgtaaaaattctcatcggcatcaataaaattatcattagtgacttgaccattattaatatgactccagataatcgttttgacctgccaattgggagcacctccccgtccggtatccatagtattatcaaaagtgggtccacatcaccgatcacggtggataagggcgcaaccctgtatttaaataatgtaaatatcacagaatgccgtgggggtaatgctatcattgacggtgaaggcaacattttcattgataattccatcctgtacaagaatggcgtgtcaaagggcattattaaatgcgaaaacctggtaatcaacaattccatcattgacaaacacctggttggcgggtatccgatcatcggcacgaacattatcatcaacaatactaaaattacagatgtatttaatattatccgcaatggcttctattttatctccaacgcgaaaaacactactattgaaaacacctgtgtgctgatcaacaattgggaaaaccctctgaatatattggatatcattgaatactatgacactcagatctgtccggccgcgtgcattgcgtccaccaatgccatcattaaaaattcatcctttaaaaatgaatttgaactggtgtatctatggcaatcaacgacggattactcataccacaacgtgtacagcggatcgaacattgaagccgtcaactctagcttcgagggctaccagttcatcatctatagccgtatgctgcagaacccgatatataagttcgacggctgcacatttaacaacattgcgaatttgatgattatgatgcagtcgcgcaattcgatcgtctcgttttcaaactcggtcatgttcatcagcggcaataaaattgcaagtaacaatgcctttaacaacagcttcctgttcaacaacaattattgggggaataactcaaaacccgtcattccaaactcggtaagcaacttccagataccgtctccggataactggattatcctgatttctgaaggcgaagagccggtatttaagctgaccgacgggaaaaatgtcaccgagtatatctgcaatttgcccgcgaaaatctcttatgttgccgacgagaacggtgaaatcattccggtgctgaatctcaacggtaacggctataaatttaatgtggatgaaaacgggaatgtggttctgaatatcagcgctccgatgaaaaatattgtgccgaaggttccagtggacgaaactgtcttcgccaatgacattgaagtgattgttaactcttcttctaactttaaggcgaagttcaccaacaaatggggcgattcactgaagggtattaacgtttccttcatcatcggtgaaaatatcatcaacatcattaccaatgaaaacgggaccgccatattgcctgttgactttgatctgggcgtctacttcgttaagattgtgaatccagtgaccggtcaatttatcttcaaaacgattgacgtgatactggagaacacggtgacggcaaacgatattattgtcaagtacaatgataaaagcaaattctctgtgatttttaccgacaagtttggcaacccgctgattaacacgaatgtcaagtttaaagtaggaaagtatattatcaataggacgactgatgaaaatgggattgcgtcatttgttatcaacttcaatgttggtaactatgcggtaaatacgattaacccggttaccaaccagagtattgataaaataattaccgtgaacaaaatagcgacgaaattgacctctccgaaactgacggtgacgtacaacgctggtaaatacttgacgctgattttaaaagactttaatggtaaagccttgatcaatcaaaaagtgtcgatcaaaatcaatggtaaagtgtacaccaagattaccaattcgaaaggccgaagcagtctgaaaattaatctcccggttaaaacatacatcacgacactgacctatgccggagaccgtaaccacattaagtcctctgcaactaccaaagtgatagttaaaaaggcaacgccgaaaatgacggcgaaaaaggccacttttaagttaaaaaccaaaaccaagaaatatagcattattctgaaagataaccgctataaagttatgaaaaaagtgaaagtctatctgaaagtcaaaggtaaaacctaccgcgccatcactaactccaaaggaaaagccacctttaagattacaaaattaactaaaaaaggaaaatattcggcgcgaatcaaatatagcgggaataaatactttaactcaataaccaagtacgtaaaaatcaccatcaaaaga

SEQ ID NO: 77068 - DNA, 1008 bp, synthetic construct
  source 1..1008: mol_type = other DNA
tcacttctttcaaatgcgaacgatagctttagcaaagcagagccaaaagggaatgtctcaatcgctatcacaggggatgttatgtttgctcgtaacatgccgggtgtgctgagtgcggactcctcgcctttcagcggtgtcagtaatgtaacctccaacgtggatttattactgattaatttcgaaaatgcggccacttcgtctgaaaatgccgttaagggtgatgttccgctgaaatgtgacccgcgctatgtgccactggcgaaagggaacaacaacacaattgcgagccttgccaacaatcatgcatttgattacggtattgatggaatgaaggataccattgaaaacctgaaaaatgcgggtataacgccgatcggtgctggcgaaaatgaaaaaacggcgcataatgccgtaacccaggaaattaatggtcgcaatatcaccatcctgaattatatggactcggacaactttgccgagtattcttatgatgtaatgccgtatgccaatgggagcaaccccggctactccgtctttgacctcgccgacgcacagaagcagattaaagaaaataacggctctgatttgattgtcgtctacatgcactttggaaacgaatatagtaactcgccgaatgacaaccaagttaaaattgcgcatgaactgatagattctggtgcagatgtggttttaggcagccaccctcatgtgacccagggcattgagatgtataacggcaaaccgatcttctacagtttgggaaacttcatctttgaccagtccaaccccgcaacgcacagcgcttacttcgtgcaaattgatctggtgaataatactggcgaatgcagtgtttatccaattgtaatctcgggctacctgccgcattatatggactcagatagcggcaattccctgctgaacgagttgaaccctaacgcggatgaactggaggtgtcaaacggcgtgggtaaactccggtttaacctaacggaaggcgatagcaat

SEQ ID NO: 77069 - DNA, 1710 bp, synthetic construct
  source 1..1710: mol_type = other DNA
agcgagatgcagcaagtgaataacgacagtgttgacagcgcgaatcagtatgtggaacccgtgaagaatgcgtcttttagtaaggttagcaatactaactatctgaaggactcaaatttcactgtcagtctgaaagatgaaaacaatgaagtcattgtcaacaaaaccgtttacttcacaattgatgatggcttagtaataaatacaacaaccgacgggaaaggcagtgcaaagctgctgttgaatatctccaaaggaacgcacaccgtcaaatacatctttaatgaaacggggttcacgccgtttaaatctagcaccaaagtgcttgttattaccacctcaaattcgaagatcaaagcgagcgcgtataaatcttacatcggctttaaaaaacattattcctatgctaaacacatcagctttaaaaacacctacaagattaccttgaccgcggatggaatcccgctgagcaatcgtattgtgaaatttaccatcaacggtaaatcgtatagtaaaaaaacagattcaaaaggagtggccagcctccctattggtttaaaggcaggccgctatcctattaaattttcctacgctggtgaaaaaaatattaaaaaagtcagtggcagctcgattgtatatgtcattaagggcatgccgaaaaagatcattaaagcaaactcactgacttataaaaacaaagtgtccgccccattcaaaataaaattagtgaatgggcgtggcaacattctgaaaaataaaaaagttacgttcactctggatggccggacctacaccaaatacacggacaataacggtattgcaaccatctacctgaaacttagttggggcacgcatagtctgaaagttagcagcgccaagacctcttattacaaatcggtgttaaaaaaatattctatccacataaaatctaaggcggttaacaacggactttggatgttcagttcggatatgaaaaaagccaacctggccagccttaaaaaggttgggacaaaacacattttcctgtatgcaaaagccattgatgtatggggccgatcggacgtggagaaattcatcaagaccgccagcggttatggtattaaggtgcatctctggatgaaagtgtttaacgatgacaacgataaatggattaatccggttaaaaagggcaaaatcaactatggtctgatcaaatcaaaaattaacctggctaaagagtacgcgaaagtaaaaggggttgcgggaatccattttgattatttgcgttatcccggcaatgcgtataaatattccaacggtgtcaatgccatcaactactttacgaaagcggcaacgagcgccatccacgcaattaactcccgcttcatcgtctccgccgccgtaatgccggaaccgtcagatatgaaatactactatggtcaggatatttcaacaatgggcaagtgcctggacgtgatcattccaatgatttacaaaggcaattataacgcgggctcgtcctggattcaaaaaacgactctcaaatttgtgaaaaaaagcggtcatgcgaaaatatggtcgggtatccagacgtaccattcggatagatctccgatcaagctgacctcatctgctttactgaaggatgctgacgcggcggctgcaggtggcgcagatggggtaattctgtttcgctatggtctaactaacttgattaactttaataagttg

SEQ ID NO: 77070 - DNA, 1467 bp, synthetic construct
  source 1..1467: mol_type = other DNA
gatagtgatcacaataagacggacgactccattcttggggaggctgatacgtcaacgtctagcaacattactcgcattggtgtgaatagtatatatgatgacggggtgaacgaaacaatcaaaaccaattcctcgtttgtaagcagcaacgtggtgacgtacgagaccttttcaaccaagatcactgtccgactgttgtcgaacaacaatccactgaacggaaaaaatattatcatctcggtcggtaacgtttcatacaataaaaccactgatgccaatggtaaagttgttctgaacgtgaagctcgcaaaaggcaagtataatgcaatgttctcttacggtggggatgaaaacattaatccgtgccagaaaaccacgacggtgattgtgaaaacgccgatcaaaaccaaaatttattgcgcagacaaaaatatcaactaccggcaggacttaaagaataccttcattgtccgtttgattgatggcaacggcaaagctctgaaaagtcaaactgtaacttttaaagtcaacggtaagatgtacattgccaaaaccgataaaaagggttacgcggaagtgtgtctgaacttaaaaaaggggagcttcactgtcggctttagcttctataaaaaatcaccgtattcacatagccacggcagctataaaataaaggtaaaagctccaatcggcaaaggtaacggatattggctgtggccggctcatatgaaacatttgaacctcaaatcccttagcaagcttggcacaaaacatatcttcttacacgtgcaggccattagcgtgtatggcaagtcttcggttatttcgtttgcgaagaaggcacacagatatgggattaaagtgcatctgtggatgcaggtatgttgtatccgcggcgacaaatgggtacgtcctgtgaacaaagatggtagctttaaatattcatttataaataaaaaagtcaaagaagccatcagttacgcgaaaatcccgggcatcgatggggttcacctggattatgtccgtttcggcggcacggcgcatctgtataagacatctacccaatccattaactatattgtgaaaaaaaccagtctgggaatccataaagttaaacccaactgcattgtttcggcggccgtcatgcccgaaatttccaagatgatttcttggtatggtcaggacatccctaccatgggaaaatacttggacgtgatcgttccgatggtgtataaaggtaattttaatcagaaaaccgcctggattaccaaaattgtaagtaaatacaaatcacaaagcaaaagtgcggtaatctggggcggtctgcagacataccacagcgataataatgttaaaaaactgagctactccgccctattaaaggatgcaaaatcctctaaagcgggcggagcgacgggttcgatactgttccgcattggcctgacacattacctcaactttaaaaaagtt

SEQ ID NO: 77071 - DNA, 93 bp, synthetic construct
  source 1..93: mol_type = other DNA
tccagtttcacgtttaattggggtaccgacacagcctcttatttcgtgaacactgttggcgggagctcggatttaaccaatgcgaactttctg

SEQ ID NO: 77072 - DNA, 72 bp, synthetic construct
  source 1..72: mol_type = other DNA
accttgccagggagcgtggttggcatcaatgcgctgattcatccgaactggaatggtctgttaaacgtcaac

SEQ ID NO: 77073 - DNA, 108 bp, synthetic construct
  source 1..108: mol_type = other DNA
ctgggctatatgagcttcatcaatggtacgccaataaccgatctgatcactgaaggcaccggtttagtgtttattgtttttccgatgattttcaacattatggggagt

SEQ ID NO: 77074 - DNA, 48 bp, synthetic construct
  source 1..48: mol_type = other DNA
ctgtccattacgactacaaccagcgagttaaccgtgaacgcggaaagt

SEQ ID NO: 77075 - DNA, 360 bp, synthetic construct
  source 1..360: mol_type = other DNA
gcggaaactgtgacgattggaggcttcgacttcaacgttccggacggttttaccgaggataaaagtcatgaaatcgtgaacatggaaaaagagcagggcggaatcaaatacattaacaatggcaagttattcgaaaacgacaaaggggatgttgtaaatattctggttgccaaatatgacggtcataaagtgaccaacaaaattgccaaggggattgctgatgagccaaaaacaatcggtggtgtcgatggttacatagtccacaatggcacctttacgagctttgattatgcgaaagaaggcaagctggtagtgatcactaccaataatgaggatgcaattgaaggctttatcattgaa

SEQ ID NO: 77076 - DNA, 558 bp, synthetic construct
  source 1..558: mol_type = other DNA
cttacctcgtcaaacagtcaggacaatagcaaaataaccatcatgggtaacggatcgattcatgaaaatggcacgattggcattaaactgaccaacggggaaaacaccgccctcaagaacaaaacggtccacgtttgcgtgaaagactcagaaggcaaaatcgtagttgacaaaacagcgaaaacgtatgtgaatggggtcgttggcgtgcgcctgacaaacgtgagcgcaggcgaatatgatgttaatgtgacctttgaaggtgatgagaattacacctcatctagcgtatctcagaaattaaagatcattgcaggcgaaagtgatgatgatccgacatatcctgtcgacgaggatacggtcaccactactgctgacgccagtagtactcagtcatcccaatcctcctctcagagccaatcttacaccccgagccgtagcaacgattatgggggcagctcgagctccgatgatgatggtggtctggatgcggactacgatgaaaatggtaatgagatgttgccaacggtagacgaggaaggaaatgaagtgtcgaac

SEQ ID NO: 77077 - DNA, 393 bp, synthetic construct
  source 1..393: mol_type = other DNA
aatctgaaggattttaaagccaccaaaatgctgaaaaaattaaccaagcaaaaaaccctcacggtgaagatttacaactttaaaccgggtgtgttgtgggctcctaaagccatcaaacttaaaaacggcgatgcaattgcgggctacgttgagtataaaggtaacatgcagttcgaaaaaggtacggggataactagttggtatatcggcagcggtctggatggcgacatcgaaccacaccatacaaagctgattaaggcaaaattcttctttaaaaataagaaaggcaaagtcaaaaccaaaacagtgaaaggaaatggtggcggacatatttcgacgtcactgatcaaagggtatgtaccgtacaaagcgaaggtttcctataaaacttat

SEQ ID NO: 77078 - DNA, 69 bp, synthetic construct
  source 1..69: mol_type = other DNA
agtaacctgggctcgaccccggtcgtggcggtaccatatgccattagcctgatcacgtccgttgattta

SEQ ID NO: 77079 - DNA, 33 bp, synthetic construct
  source 1..33: mol_type = other DNA
agcgttgtggcggcccagaacccgtatattatc

SEQ ID NO: 77080 - DNA, 33 bp, synthetic construct
  source 1..33: mol_type = other DNA
tttctgggcaccttctataacgtgccaacgccg

SEQ ID NO: 77081 - DNA, 318 bp, synthetic construct
  source 1..318: mol_type = other DNA
accccgtcaatcgaggtcaagaaaattgacatcaaagatattacccggtcaatgattgatgaaaaggtatctgttcgtggcatcatcaccgatattaaagagtccagttccaaaactaattattttttgacgataagcgacggtgaaagtcgtattacgcttattatattcgaaaaacaggttagcgagattacttctcgcaacctggatattggtgattttaaaaataaaaaggtggaagtggtggggaccatcacagaatacaaatcggatctggaactgatcttatcgagcggcgacagcctccgcatcattaac

SEQ ID NO: 77082 - DNA, 147 bp, synthetic construct
  source 1..147: mol_type = other DNA
ttgaaaaactcgaaaggcaaagtgctgacggggaagaagattacggtcaattattctggtaaaacctactcacgcaccaccgattccaaaggctgcgttagttggaacgtacagaaaaaaccgggtacatatagcgtgaaatttact

SEQ ID NO: 77083 - DNA, 261 bp, synthetic construct
  source 1..261: mol_type = other DNA
cagactagcagtaaaaccgccaaagtaacggtgaaagcgatgccaacgtccttgaccgtgaataacctggctttcacctatggcgacggcaacaataagttaaaagcgacactgaaagataaaaaacgcaaagttctggtcaacaaaactgtcgtgttcaattttaacggtaagaactataatcaaaaaaccaattcgaagggagttgcaacgcttaccattggtgccgggccgaagaaatacacgaccacaatctcattt

SEQ ID NO: 77084 - DNA, 225 bp, synthetic construct
  source 1..225: mol_type = other DNA
aaaaagaccgttaccgtaacggtcaatagcattccgacatcactgacggtgaacgatctgacttgcaattatgatgacagcaatgcctacttgtatgcaactttaaaagataccaagaacaacaaattccttagtggccagaccatcacgtttaaaatcaatgataaatcgaaaaacgtggtttctgactccaacgggaaggcgggtattaaaattgaagagaaa

SEQ ID NO: 77085 - DNA, 525 bp, synthetic construct
  source 1..525: mol_type = other DNA
gcaagcattagcaaaaagattaatctgaacgttcagggagccctgacacctgagatcaacatgcacaatggtttttataacgtatcgaatttgttagtcgattttactggcgataacgcggagtacattgtctactgttcgttcgacaatggcgcttcttggtataaagataatcacagtctgtctttcaatcttacgacgtgcaattggagcatcatctattattcttcgtttcgcggcttcaacagcaccatcaaccatgtgaactatgtgctcgatggtgatgttccattggtgtgggcctcccatgggtcaggcatttataatacgaattttcaggtgaacctgacaagtgttgacctgttcgatgaaaaaccgataatctattacaccctggatggttccgacccgaccgtccaaagcactatttactcagaacccattaatgtggtaaaaaacaccaacttacgttttttcgcgatggacacctttaaccatcggtccgaaatcattagtgtttactac

SEQ ID NO: 77086 - DNA, 2691 bp, synthetic construct
  source 1..2691: mol_type = other DNA
aacggcaaaacatacaataccatccagaatgcgatcaacgacgataaaacaaaaaaaggcgacatcatcgaagtgaacaaagatatcatcattgaaaatgttgttattaacaaaaacatttatcttatctcgaacaacgtgatttggcaatctaacaacaagtccccgataatttacatgaaaaatgtaaacaataccttcattgagggcttcacgtttaaatcagataacgggagcggtattgagctgaataatgtcagcaattgtgttatccagaataacaacttttataacaaatatggttttagcatccataacgagaataaagataatgacaatctaaacaacatttgtattcagggcaacaatttttatgataattactataactatattaatttcgaagtcctggaaaattcaaaaatcatcaataacaattttgaatcgaataaaaacgttagcgctatcaccatcttaaattcaaaatccaacattcttataaacaaccagtttacgaatctgaactacggcattttaattaacaagtcctatgatgatgtgttctttggcaacaatttctctataaataatatcgggctttatctgaattgtgttgatagtaaagtaatcagtaacacgtttattaacaatcactatggcatttactctataaatgcgtcgaatctgcgcatcaatttcaaccgtatcgtagataactctaaattcggtgtgtactgcaaaaagggtattgtcgatgcaaataacaattggtggggtaaaaactacatcacgaacaacgccctcaattccggcgatataaacaataatgaaaacattggaatcaactgttctgcatatctggtgttgaatgtgtatgaaactaactacaaaattgataacggcattgtgtacaatgtgtcttatgtggcgaacctgaggtccaataactacggggaaattttcaatcaatattttatcccaaattgcaaaattgtctacaatatgtattgtgaatacttatatgacaatggggttgtgtaccgcggtgtaaatcgcatcattgacctgatgctgtcggaaggtagctctattaaagaatatcgcctgggcttcctgaataatctcactgttacactggatcatcaaaacatctcattcttccgtgaaagctcatttaacgcctacgcaaccattgatatcgttagttcggcgatctttaatggttcaaatcttgatattagtgttcgcgtgcccctggttgataatgtcgattggtttagtattgtatgccggtacgtggggaactttaaaagtgagttactgctgatttacaacggcgaagtgcgcaataccatagtgattgaaagttccttctataatgaagccaagaacgtgttttccaacaacttttggaacgcgctggacacctaccactcttgcttctcaggttaccgaaataagcagatctgcgcctacgcgtatctatatctgaatgaccctagtttgaatacaatcgagctgttggacaataaactaagtaaaagcaacatccagtttaagctgcaagatgtctataatctgctcgcgaataataacattactcttaacgatattctgctgaatctgatcaagaatagttatagcttgtcggatcttgagatgtcatttattgattatgcaaacggcaacctctttgataccatgagcgtgagcttaaaatatccgggcaatgaccgcttatttttcgcctttgaagacacaatcaacaaaacgtttgtgtggagaggggactcgtccgtcagtttgtacaacatccactatgtaaacggagggtacttcgatctgacggcgccgttcccaattggcgataacggtgacctgatctatgacaacggcaacatttactccatcaactataactgtatctacacctttctctcgtcagattatgattgcctgaaaacctatacctttgcaaacagcaaaattaacaataatgcgctcaactactggctgaaccagaagaaccgtacggatgtgaatggggaattatattataacataggctatatgaaagccgcttatggtagtttccttgaaggtctgctcgtcatttactgtaatgatgtggtcgctgacgtcagcgcagataagttcaatgtatcctggacccgtgtaaacccgatggtgatgagcgtctgcgacagcttggagggttactatctgactggcgagtcggactttaactttggtcgggaagtagtgggtgatgtaaacaacatcaaatcatttaactttgcttgcagcgcgagcttctcgattattgaaaagtatgttatcgacgccttattcccgaatgaaggcaacaaatcttccgctatgttttctctgattgatagcctgttcaacaatggcaccctggagttcattgtggagggcaactatacgttgattcgtagcctgaacgtcagcaatgttgtttttgtttacgacgaaacgactggaatcctgcgtgattgtattaacggatgctatggagcatactgctatgccagccagcagactgagtgggggcataactttggtgaaaattcacttaaattagaagacctgattgttggtattataaatggaattgatacctcgttggacaatatgaataacgattggttaggttttgcgggctgtttg

SEQ ID NO: 77087 - DNA, 45 bp, synthetic construct
  source 1..45: mol_type = other DNA
accggcttgtttctggttagcaacccggtgggttggagtattgcg

SEQ ID NO: 77088 - DNA, 78 bp, synthetic construct
  source 1..78: mol_type = other DNA
acctattacgccgatgatctgaacaaaggctggaactataatcgcggggcgcatttcatttttgacgtgggtacgagc

SEQ ID NO: 77089 - DNA, 57 bp, synthetic construct
  source 1..57: mol_type = other DNA
tattacattaacaaatatattattggcgatatagtgatcaataaaatctttagccgc

SEQ ID NO: 77090 - DNA, 36 bp, synthetic construct
  source 1..36: mol_type = other DNA
ttcggcagcagtatttttttgtttatcctgaacaaa

SEQ ID NO: 77091 - DNA, 42 bp, synthetic construct
  source 1..42: mol_type = other DNA
tttaacagtagcattatcctgaaatatctgaaaattttgacc

SEQ ID NO: 77092 - DNA, 39 bp, synthetic construct
  source 1..39: mol_type = other DNA
acggatagctttctgatggacccgattagtgcgatcacc

SEQ ID NO: 77093 - DNA, 2979 bp, synthetic construct
  source 1..2979: mol_type = other DNA
gcggaagatattaacgagaccatcacggcggactcttcaatcgatgatgtgaatactgtgtctgttgaagacgcagttgatgaaacggtatcggatgattcagatagcgataagggaatcgtggagaatcaggacgtcgaaaaaacaaccatgctgacggaccgtggagtgaacgtgaacgccgccacctggagcaaattatcccagtatgcgggcgttattggcaccgattacattataaccttaaccggggacagctacgcgacggatagtcaaattaagtttaacaatggtgcgacaattattggctcgccaaacaattacatcacgacgggctcgtacactaaaacgccgtttctgaataccaactcggctctcaccatcactttcatcaacgtcacatttaagaacatgaatgtcgactatcttctgagcctcgcaggcaccaacgttctggaaaactgtaatttttataatattacggcgggcacaggtcacaatgccgtcatctataacacagacggcaccatgaatctgacgaattgcaacgtgatcaattcctctgcaggctatggtgtggtaagtaattataaatctggcacttataccggggtggttatgaacgtaaatcattgcaccttcattaataactctgcgagtgtcgaaccgggtgcgattaataactgcggcattctgaacgtcgataactcagaatttatcaataatacggccacttggtgggccggtgccattcacacccattacaacgcccaaacgatcatcaataacagtctttttgaaggcaacgtcgcgggatggaacggtggagcactgtatacctacagtacattaaaggtctataattccatttttaaacgaaataaatgccacacaaatattggtggcggcgccatcggtgcgtcccgctggtggtcaggaaactatgacattaccatcgtgaactgtactttcgaagaaaacgaaaactgcaacaccaacggcaatggtggtgcaattacggcgttgaacagtggggcactgaatgtgcatgactcaacgttcatagccaacgtcgcaaaaaatggtcaagcaatatcggctttctcccaggcctttgaaaatattaccgccggtattccgaacctgaaagtctacaacaacacgttctacaatcacacgctgactacatccgataccgttgaaataagtggcaactacacctttgaaaacaacaccttcatcaactgttatcagacgaatttggggaccaacaacgtatttattaatcctgtaaccctgaataacaataacttgattctgaaatcaaataaggagcatttgctgatgagcaatctgtcggaaaatattctgaagaatgcgccgaatgtcatctatgtagatagcaattcggataaggactgtgatgaagatcccaatattgatggtcacaattgggaaacggcgtatggcggaatctttgcgctgtccagcgccatattcaacatctgcgatggtggcaaaatttatctggccgacggtgaatacagctaccgtacaaacggggcgattacccatccgaaaaacctgactatcattgggcagggcgcaaacactattgttgaccttatctcatgtggagaggaaacgacctatacctgcatttttattaatttgacagtgtcgggcaaggactatggtcgtaacaccaattttattaattgtacatttattaaaccaatttcaatctctgccgacataaatcttaatagtgttctgaaggaacatgctgtggagaatggttatgcaaacacatatctcataaacttcgataattgtgttttcaaagatgtggttgacgatcgcatcatcactctgtttgagtatggggcgttgaacttcacggactgcgttttcgagaatattacggcggactcaattgtgtatcgcaatagcacgggctattttgaggatgacagcatttccttccgtaattgcaccttcagtaattgcaagtttaatggcgtagtggattctaagaccaactttgatgatgcgatcgtgattgaggattgtacttatgatggtgatgtggcgttaggtacgacggaggttgatgggcatttttatgtcaacgctaccaaactgaaggtggtcgctgtggctacgaatatgagcatttcgtcttctcaacgcggggttgtagtgattactcttcgggatgctgaaggtaacgctgtgagcggcgtgaacgttagttacacggttaatggtgtgaacatgagcggcgttagcgatgccaatggcacgatcaccatctctgatctgaccgacgaagttactgtgagtgcaaatttcactgggagcgaatcgtatctggcttccaacaacaccgctagcttcaatttcacaattccgaaagtgtcaacgaaactctatgtttctagtgtgactaccttttataacgccgggaagtacttgacggctactctgaaagattccaatggtgaggttctcgcgaatcagaaagtgacaattaaaatcaacggcaaaacctataacaaaatcaccaacgccaaaggccaggcgactctgaaaatcagcactcttttacctaaaaaatatacggcaactgtaaactacgcgggtgacgatacccatattaaatcgtcagcgaacgcgaaagtaattgtaaaaaaagcaacgctgaaactaacagcgaaagcaaaaacatttaaaaaatccttaaaaaccaaaaaatacaccatcaccttaaaaaacaacgtaggtaaagtcatgaaaaagaccaaagtcaccctgaaaatcaaaggcaaaacctacaaagcatacaccaacagcaaaggaatcgccacctttaagatcacaaaactaaccaaaaaaggcaaatacaatgcctacattaagtttgcaggaagcaagtactacaacagcctgaacaaaaaagtcaaaatcaccctcaaa

SEQ ID NO: 77094 - DNA, 615 bp, synthetic construct
  source 1..615: mol_type = other DNA
gatggtctgatcaacactttcgaagataccatccatgccggtggtgcggactttagcatttccggaaaagaaacgggcaattcggcatatggaaccaataccattgattctagctggacagaaaaaatagccaaggtaccaggcgttgatgaagcgtacccgatttatgtggtgctgacgtcggtgggtgatgattatatgaacactttaattggcattgatccggaaggcagtgaacttgccgacatcagcatgaaagaaggccgcatattcgaggacaacactagcgaggttattctcggcgaaatctacgcagaagataacaattatagcgtgggagacagtatcatcattaacggtgaggactttaaagtctccggtatttacgaaacgggtgatcaaaacatggctggcggggtgtttaccagtatctctaaaattggcgagctgatggacgataaagactccatttcaaacatctatgtcaaagtaaataagggggaagatgctcaggcggttgcagatcgtattgataccaaatacggggacaatatcaccaccgtcacatcagttatggagatgacgcagatggcggatatgttgaatatgctgcag

SEQ ID NO: 77095 - DNA, 33 bp, synthetic construct
  source 1..33: mol_type = other DNA
ggtccgcagatgggcattaacccactgtttacc

SEQ ID NO: 77096 - DNA, 639 bp, synthetic construct
  source 1..639: mol_type = other DNA
gtctggttcattggccatgacgttgatctggatgagggcagcaaaaccatattggtatgcgccattgacgaaagcgaggaccgcccaggtatgggggcgtgtgatatggccttcctggttcatttggaaaatggagctattaaaaattatactcctgtctatccgggcggtatgacgcacccgacggctcaggagcccgcggaagcgcagagtcagggtgccggctcagatctgttactacacgacgcgttctgggacgtggataatagcaagggtatgaatctcgcgaaagaaatcgtcgaataccgtaccggtagttccgtcgattcggtggtagcaatcaacaccaaagcactggatgctattctgtccgcagccgcgccgcttgaagtgaacggcaaaatcattaacggcagtggaattgattttatccgcgaagatggcagcaatggcgtgtcgcggggtgacgcagtaatggaaatagtgaaagcgacagcaaactctgccaaagacccggttaagaaatctgcgatgatcaacgctgccgtggatcagtactcgaaaggtaacatcattatggatcaacaagggagctttgttgatctgttagcctcaaaggggattgagactttttttaat

SEQ ID NO: 77097 - DNA, 33 bp, synthetic construct
  source 1..33: mol_type = other DNA
agtagcaccgtgatgggcgatattctgtcctcg

SEQ ID NO: 77098 - DNA, 66 bp, synthetic construct
  source 1..66: mol_type = other DNA
atcggtaatccgcgcagtggcattgcggtgtacatgagctatctgatttccgaaatgaacatcaac

SEQ ID NO: 77099 - DNA, 420 bp, synthetic construct
  source 1..420: mol_type = other DNA
aaagaaaaggtaaaggtaaatgtttccattgacgatcatcctttaaacaataaaggcttcattgtgatcaaattggtggatagccgtggcaaagatattgaaagtaacggcaccattcactataaaattacggatgagtttggtaactacaaatgggcctacaaatcatatgatggtgaaatccgcctgaagtacaccgcggggatttataaagttgacgtcaagttcgatggggattttcactataactcggcaattaaaaacaaatctgtgatcgtcaaaactgagaaatttaatccgtatacgtattacgataatcataactggggtctgaaccaggaaatagacgactatatcgaatacaattattgggatgaagacatctacgatgacccaacaaattatgatggcgagggaccg

SEQ ID NO: 77100 - DNA, 78 bp, synthetic construct
  source 1..78: mol_type = other DNA
ggcatgttgagtgaatgggttgcgaccttcctgggcgatggtttactgagctcctttgtgtgcgacggtattatcggg

SEQ ID NO: 77101 - DNA, 105 bp, synthetic construct
  source 1..105: mol_type = other DNA
ttcccttatggcggcagtgatccgcagatgagcttgctgggtatgattggtacggccattgcgccaatctttgcgccgctgggatttgggacctggcaagcagct

SEQ ID NO: 77102 - DNA, 78 bp, synthetic construct
  source 1..78: mol_type = other DNA
tttggcactttggcgggtatggaggaagatgacgaagaagggattaccaacctgatccatgatacgttcaccccgctg

SEQ ID NO: 77103 - DNA, 54 bp, synthetic construct
  source 1..54: mol_type = other DNA
cagccgggtaacattatctggagctatagttggctgcatattaccgattttggc

SEQ ID NO: 77104 - DNA, 42 bp, synthetic construct
  source 1..42: mol_type = other DNA
agtgggcaactgggttattttggccagaatttaagcattaac

SEQ ID NO: 77105 - DNA, 141 bp, synthetic construct
  source 1..141: mol_type = other DNA
attgcatcgggcgacccggacggtctggaaaaatccgcagaagatgcgagtgtgcctgaggacttccaaattgaacccattaatggaatcccagatgcgatctttccggattatgcctttgctagcgccccggataaccag

SEQ ID NO: 77106 - DNA, 36 bp, synthetic construct
  source 1..36: mol_type = other DNA
aacatgccaattccgtttggtaccagcggccatatg

SEQ ID NO: 77107 - DNA, 51 bp, synthetic construct
  source 1..51: mol_type = other DNA
gtgggtggcatcccgctgttaaaaccgagcattcgctatctgttgaaacca

SEQ ID NO: 77108 - DNA, 261 bp, synthetic construct
  source 1..261: mol_type = other DNA
cgtagcctgagtgagatgaccataacttcttcaacaaatccgttttatacgctgcaaagtcgggcggatttcacgctgcatgtattaaacctgcttgattttgttggcggcaacgcaggtttaacacacgggcatctgttgacctcgtccattccaggtagcgatctgggccctcgcatgctcatcggcaaaatcattgcctggcgcaccgaagtgacggtgaccccgactttgattggacagatggttgtcgacttcggt

SEQ ID NO: 77109 - DNA, 699 bp, synthetic construct
  source 1..699: mol_type = other DNA
atacatatcacaacggataattcctcagaggtgcagaaaaccgtgtttgacgcatcgaccatcaacaaaattccggatacctatttcaactattatcgcgatggttatattgtaggtactactgtcgatggatttaacgcgagtactggggaaaaaatcactctcaatggcacgataaaatggattggtaacaatggtggaacagacgttaagatcctggtcgaatccgacaataccacgtacctggttggtctgtataagagcattccggaagcggatatttatatcgataaaatttcactggaaacgaatggcagcacctacccaaacctggtagaaattaaggccagtcccgaaaacatctccaccatcaatgatctcaacaaaaatctgtcgaacagtgattttgaaatctctacgattatctctctggattccttggacttggtgaaaatccaagagatcgctaacaaaattaactcgcacgacaaacgcatggcgattaaaacccctagttcaggcttggggaatagcctgatactagaaaacgcaaacaaacagacgcttgacgatgccaattctgtgttaggcaatattaacggcctgacagatgagcttaccattcggatctacaactgcagcgacagccaattagagcaggttaagaatagctacaatattaccaatattcgtacattc

SEQ ID NO: 77110 - DNA, 66 bp, synthetic construct
  source 1..66: mol_type = other DNA
agtgaagttggcatcctgccgtatacctttgtcaacgtgtacttaagcattcaggagattgcgaat

SEQ ID NO: 77111 - DNA, 45 bp, synthetic construct
  source 1..45: mol_type = other DNA
gatctgggcaaccgcattaccgaaatctatcatgcggtgtttgtt

SEQ ID NO: 77112 - DNA, 333 bp, synthetic construct
  source 1..333: mol_type = other DNA
gttattacgaacaatggcatttcgtttaataatacaagtgattctgtcgtgaacaataccaccaatacaaccaatatcactgctaacgatactgatgaaacgggtgcgacgcacgataccggtctggtagcctccagttcagatgatggttccagctacagcagttcgggatatagcagctctagcggctcaaacagcggttctagttcgggccatcaatcggacaactctcagagctccagcgggagtgaatcctcgtcaggctcagagtccaacagcgaaccggaatctgacagcgcggggcagagtgaaggctcatccgcagacttcgag

SEQ ID NO: 77113 - DNA, 123 bp, synthetic construct
  source 1..123: mol_type = other DNA
ttattgggaggcatcgatattgcaaacactgcgctgacaaatatggtgaatctgtatccggccaacgccattgctaccggcggtacggggtggacggcgtttccggaatttggtaccccattc

SEQ ID NO: 77114 - DNA, 102 bp, synthetic construct
  source 1..102: mol_type = other DNA
aatgtgtacttctatgacaagctgggtaaaattgccgtcgatgttgtgggcgggaacattgataaagtaatcccaacgtttatcaccatggcgttgccggaa

SEQ ID NO: 77115 - DNA, 84 bp, synthetic construct
  source 1..84: mol_type = other DNA
aaaaagacggccctgggcttagggatctgcaaatttgtgttcggtgtcgaaaccttgctgccggttgcgccgtggccatttatt

SEQ ID NO: 77116 - DNA, 1026 bp, synthetic construct; identical to SEQ ID NO: 76585
  source 1..1026: mol_type = other DNA

SEQ ID NO: 77117 - DNA, 108 bp, synthetic construct
  source 1..108: mol_type = other DNA
ggccgttatccgattagtcccatcgatgtgatcaacaccatactgtgcccgatcttccctcagttggaagttagcccaaccattactacgattgtctttgagattcgc

SEQ ID NO: 77118 - DNA, 72 bp, synthetic construct
  source 1..72: mol_type = other DNA
attgccgatccagatgacaaactgccggaaattgtgtattggttaatgggcagtctggcgagcatcaccatg

SEQ ID NO: 77119 - DNA, 1938 bp, synthetic construct
  source 1..1938: mol_type = other DNA
caggatatctccaattcaaccgactttacgtttcagaatagcaatttcgactacttggaaaaaacggatagtgttaacttgattagcacttcagataaaatcagcacacatatcgacgtggtcagtaacaccacctttgatggtactgtggactatttcaagattaaactgtctgatgaaaacaacaaatccgttccaaacgcgaaagtgattttcaccgtgaacggggtgagttacgataaaaatactgattcacagggtatctcttcacttcagattaacctggcggacggttcatataaagtcatctctaaattcgttggcgactcgaactataaaagctcctccaaatcaaccaccattaccattgacaatactcgcattgtcgaagatggcctgaacaatgcggaaattcagaatataatcgacgatgctaaagaaggtaatgtgatactgtttaaaggaaatagctacagcaacatcaatttagtgatcaataaacgtctgacactaatttctaccgtgaataccgtactgaagtccagttcatcatctccgaccattaccattaaaggcaaagaagcttcgtattccattgtgaaaggctttaaaattcagggaaatggggatggtgttgtagtggatggctcgaactacgtacgtatcctcaataatgacatcacggctgacggcgtaggcatcacggcatttaacgttaaatacatcaatattaccggtaataatattgttaaaaatggtaaatgtggcattatcctttactcaaccgagaaatcttacatcatcaataacgtcattaacaataacaatgcaaatgggattgtcttgaccaagagcgatattacatacatcgatagtaacactattagcaacaatgcgcgttatggtattttactgacaaacaagttcaacggtaacagctacaaaaacggtcctgaaaatgtgtacattactaaaaacacgatcaataacaacaaatgggacggtatttcggtcaataatgccgaggataacattaacattaaaggcaataccatcgttggaaacgatgaaagtggtatttctgttaatgttgtaggttcctacaagattcaatctaatattatcacgaatagttatactggtgtgcggttcgacgaggatcatgtgcagaagaagaaccaagaaattacgtataacgcaatctatggcaacgcgcacgttcaaatcgaagcgaaatcctataacggtgttaaccctttaagcgtgggagataactggtatacggatgatggattactgtgcccgaagatcaaaaccaacaacctgaaatttacagtaacccagatcggcaaaaatcagttccaagccacgtttgtggattccaacggcaacattgccagtctgctcccggaccgagagctgaaatataaaaccaatgatggtaaaatcgccacggttatgattaagggcggcataggcacattcactgtcacggcgtctgacgcggacattatcaagtcgaccgtggatcgcacaagcagaaaaaacgtgtacgattcgaatagtcccacgaaaaccccgcaaaatgggcaatcgccgacatatgattatccgaacatagattatgggggcggccagggcaacggcaacgggcaggggggaaatgcaaacaacggtaatgggtctagccaaaaatcgagcgatgattcgggcaatagctcaaacagcaaaaagatggaaccaaatagtaaccccgtcaatcaggccaacgacgtcagccagagttatgacacgtcgcagagcatggcgcgcgctgatgccagcgagatcagcgggggagcaaactccggctcccaatcgattgccaaacagattataattgaggatgatgaattttttatcgtcaagggtcttagcctgatcgtactgctcatactg

SEQ ID NO: 77120 - DNA, 1374 bp, synthetic construct
  source 1..1374: mol_type = other DNA
gtgtccatcaatgataacctaggggatgcatcgtcggatctggaaaatgaaatcattaattcaaaaaatggcgacataatattgattaaacctggcacctataacatccacaacatcaccattaccaataaaactatcaccctccagggcattggcaacccaagtgatattatcattgatggagggaaacagagcagcatttttttgatcaacaacattactacctgcgtcacctttaagaatctgacattcattaatggtttatcctataattttggtggtgcgatatgcattaacacgggtagcgtttatatcgataactgccagttcatcaacaacacagccctgaacaacaccaatgcgggtgccatttccaactacggaaacgaagataacaaagcatacctccttgtaaacaacaccctcttcatgaataatcatgcggaccatgatggcggggctgtaacaacttgttacgccaattctgacatgtataattgtgtctttatcaataacactgccgtgcgtgatggtggggcagtgcgcgtcagtgtttatgggtatggccacgtagaggattgtatttttatgtacaaccatgctgacgagtggggcggcgcctactacagttggagcggtacttcgaaaatcaaccgctgcatttttatgaacaatacggcgggaacgaatggtggggcagtgatggtgagcggcaaccttgaccttgaaaattcaattattgtcaacaatagcggtggaaaaacgggcggtagcttttacattcaggaaccaatgtatcaagcaaaaacctatattaatgttaacaataatctgattacgaataactcgtcaccgaaaggtcaagaaatctatgtgaaatggcgacattcacagaacctgtatccggactttaacgataatgattggggcagcgaagatcctaacgattacaaaattaatgacccggataatgttacggcccgtagtaaggtgaagactacgacggataagtccaatttactggacgaattgaatttcaacgcgctgaacaaatactatgatctgattaaagattacttcccggagaactatctggaaaatatcaagaaacaggcggaaagcaaagctaatcaaaacaaggagaacaacaagaacaacaccccgaataacaaagacgaacacggcctgaaagatagcaacaataccaaaaatagtctgaatgactctaaaatcatcctgtccaacaaaacaaccgaaaatatcgagacagagaattatttaatttcttctaactcaaccacgcccataggcgacgatgaaaaagcgtatgagctgaatgaaaccaaaagtgtttccaaatcgcagtctccgcgg

SEQ ID NO: 77121 - DNA, 2841 bp, synthetic construct
  source 1..2841: mol_type = other DNA
gaggataacaatgtaaccgagaatgccacgaatgaagatttccaagcgattcagattctcattgataacgcaaatccgggtgattcgatatacttagaaaacaaaacttatcagggcagtggctcgccgataattgttaataaaagcgttaatgtctacggggtggattcgtctaagactattctggatgccagtaacaaatcaagtatctttctgatcagcaaagatgttaaagttaacttcaatggtctcaccctgacgaacggttataacgaaaccaaaggtggcgcgatatataatttaggtattctgaacattaccaacagcaaaatttccagtaactatgcggagagcggggctatacggaacgagggtaccggtaaactgactatttcaaattctctgtttgacaaaaactgcggaagtttcggcgcagctattgataattacgtcgggtatttaaatattgttgatacaacattcacaaataacgattgccttgaaggcggcgccatctataaccgattcggtgagtttctggtgtacaattgcacatttatcaataacagcgccgctcgtgggggtggcgtgtataacaacagaggtggcatgtatatctacaactcccgcttcatcgccaacaatgtctatgatctgggaggaggaattaagagttggggcagctgtgaagtgtacaacaccgtactgatcaataatacggccaaacaagggggcggcatttatgtatctgaatttacgctgattgcggaaaattgctttgtggaaaataactcggcgcattggggtggtggcatcgcggttgaagcaaaagctacggccaaaattaaaaatgccacgattataaataacttggcggaccgtggcgcaggtattgatatcaatatgggctctatcgacctgcaggactccattgtcaacaataacgtggcaaagtatggcgcgggtggcatctactttgcgttgctgtcgtcaaccgtaaaaaatacttacatctgtaacaacatcgcgaacacctccggtggagggtgttacatctatggatttcgcggcgtggttgtaaacttcaccaatgtgattattaacaacaatagtgcgagcaaagggggcgccatttacagtaccggaactgcaaatattcagaacagcatcctgaatagcaataacgcttataaaggcggcgcgatctataacgaacttaacttaacagttaaagactctcaattcttcgaaaacacagcggatagttggggtggcgcgatttacaacaacctcaattcctttattgataatgtcgtcctcaatagcaacgaagtaaaacaatttggtggcgctatttataacgaaaaattagtcaatgcgaaaaattctctttttgagtcaaataaagccttacaggccggcgcgatctattcgaccaatgacctgatcatcgataactcgcaatttatcaaaaactatgtgaaacgtaactattgcgttctaatgttgagcaaaggtgatgtgaacattaccaattccctgttcaagttcaacaccaacgcggatgagggggggtgtatttttaactacaatgcaaacctgctcattgatgcttcgcagttcatctcaaacgatgcacgcagttatggtgccgctattgacaacagcggtaatctgacgataaaaaactccttgttttataaaaataaagcatatggcgcagccgcgattgacaattcaggtaatctggtgatcatcaaatctaatttcaccgacaacgtggctactaacaatggtggggcgattgacagcaacgggaaactgattattatcgggtcaatctttaagaacaacctcgctggaaacaatggcggcgccctgatccttcgcggcgacacgaccgtaacccattcgattatctataataaccacgacaaaaacggctatgcaattttcaacaaaggtgtggaaaatatcagcctttccaataattggtggggcagcaacaatcctgactttgaaaaattattgaacatgggaacgtctgatgattttaactggattattatgagcttttcaagtaataatcagttaattcagtacaaaaatagcatcttgaatataaatttcgataacgtcaaggataagatgggcaatgtgtacaagattaactcaaccgaattgttgccgatttttaaaatcgcactgtccaactacggtgaggttactatctctaatggatttaaatctatgaacaaaaatatccccctgatcacatcgatttcagcaaaaattgacaatcagagcattattctgaagatcacgccgacgaataaacgcataattgacaataagaacattgtggtcgattacaacggcaaagttacctataaggtgcgtgtggttggtgttgatggcaaaatcgtcggcgccaacgtagcggtggtgatgaaaattgcaggtaaaaaatacactgttaaaactaataaaaatggttttgtatctaaactgttcagcctgacgccagggaagtactccatcattaccacctataaaggctttacggtcaaaaacagtataaccgtgaaaaaagtactgtacgcgaaaagcatcacaaagaaaaaatcgaaaaagattacctattcggtctccctgaaaatcagcaacggaaaaccaatcgccggtaaaaaaatcacgtttaagatcaagagtaaaacctacactgcgaaaaccaataagaaaggggtggccgtcgttagcttcaagaacctgaaagtgggtaaatactccgttattgttaactatcttaattcaaaggtgaaaacaacgctaaaaattaag

SEQ ID NO: 77122 - DNA, 4338 bp, synthetic construct
  source 1..4338: mol_type = other DNA
tcagatgatagtaatctgaccgacgatctgagcagctttgccagcgatttcgacaaaagcaacttaggtcagaacatcgaagtgaacctcgataagctcagtttcagcgaagattcgcctctgtcggatacgataattgttgaagaagtggaaaaagatcacaatgagatggatgattcaaccatccagaaagccatcaataatgcaaaggccggagataccatcatcatcaacgggaccagctatgtgcactgccactttattatcgacaaaaaattaacaataatcagtaacgttggcacaacgatggaaccatgtggtagcgatgctgtctcgggccatcgcggtattttttatatctcgccggaagcgagcgggactgtaatcagtggttttactatacgaaacgacgtggcgaaagcggatgattatggaattttggtacgcggggcggacgacgtgaaaatccagaactgcgttatttacaataatgggttgtcgtctgacgccatcagagtggagaataccaaaaacaccgtaattgaaaacgtctcaatctcaaaagcatttaacgggattcgcattcttgatagtgaaaacgtcaacatcagtgattccttcattgacaatgccaaatattgcattaatgttattgactctaacaaaatcaacctggtttcgaataacatcactaacaacaagatttcagggattgcaatttccggctcaagcaaaaatattaatattctttctaataacatttctaaggggcatgttggtattaatctgaccgtagcgaatcatgtttatattatcagcaactatatcggactgtcggacaaatatggtgtgtataccaactgcaatatcacgaaaatggaaatcaaaggtaacttcatcgacaggaacggtaactacaacattttcaatgaccatcgtgtgaagaacctgtttgtaaacggcggggagaacaaacaggtcatcaacaataattatatgattggcggggacaatcaggatcggccagtatggcatcaggtgtacgaatatcgtcctggcaagggcgacaacacctataatccggagaccgatacttacacttatgtgggggaggacaacggcgattactacggccaccagagtggcacattcatgggttacgtcctggctattaaccaatttttgcagtgcccaaacatatatttcacgttccccacgaacggtgtaaccccgtggactaaaaccggcaactataatctgtacctgagtgaaattacgcaagttaaaaaaggcgtatactcaatttcaatagttgatgttgacggcaatctggcggaagagatcagttctgtcccggtgacgttttacctcatgaagaataacacggataacaacggtaaacagaaggctccgcaagaagacgatgtgagcaaagtggtcatgatgaaaaatggtacggccactgtgcgcttttacccggatgagtttaaggaatctgataatattttacttgcaagtttcccaggtatcggcaataacatttattcgaatatgtatagcccgtataagctgttcagcattgatgataaattcatcccgggcaacgtaacggagaccaaagtcactgtgtcgaacctgaatacatatcctaactccaacgcaattttcaaagtcattttaatagatctgaccggtaacgctattgccaatgagctggtcaacttcaaaattaatggtaaaagctatggcgcgacaacagatgtcaatggtgtagcgaaaatcaagatttcacaaagcaaagaaggaacttatacaatcgcggtcaattatattggcgacgatattgactatacttccagcagcgcgcaggctaaggtcgccgtcaaaaaaatatcgacgaaaattctatcttcaaatgtgtacatgatcccaaacattgctgaatactactcgatcacgctgaaagatgcctccggtcacggaatttcctaccaaaaggtgacttttaaactgaataagaaaatctacacggtcaaaaccaacaaaaacggtgtggcaaaacttaaactgaaatttactaaaaaaacaacctactatattcatgttaattttgagggcaatagcaaatacaaagcggtctcaaagaccaataaaatcattgttaaatattcctcgaaaattgctaaactgacagttcctaaagtgacaattcttccgaaaacctataagtattacacaatttcgctaaaaaatactaacggcaaaggcatcgcaaagcagaaaatcacggtcaaattgaacggtaaaacttacattaaaaccaccaacggcaaaggcaatgttgcaattaaagtgaaattctccaaacttggcgcctacaaagtatcggccatttacaaaggcagtaaaatctataaaaaaacgtcttccaatggtaaaattgtagtggccaagagcagcaccaagttcacagcgccgaaagttaccattctgccgtatgagaagaaagtctacacgaccactctgaaaaccagcgctggcaaagcattgagcaaacaaaagatcaccattgtgctgaacggcaagacgtattctaagacaacgaacagtaaaggccaggcgagtattaacgttaaattttcctccgaaaacgtttatagcgtgatattgaaatacagcggcaacggctactataagtctagtaaagcaaccggcaccataacggtttccaaaatctctacgcagctaataagctacaacaaaacctttgcgattgattcaacgaaaaacttcaccatcagccttaaggataaatctggtaaaaccctgtccaatcagaatatcacgtttctctttaacaatcagaacctcaccaagataaccgacgaaaatggcattgcgtcggttaatctggatgcgaatgtaggatcgtttgagatcatctcaaagtattgtggaaataaccagtacaaatctatatccaatacaaacatgattaccatttctaataaaaccaatgttgtatttgttgacgcaagtttgcccaactcggaaatccaaaaaatcttcgatgattgtaaaaacggcagcaatgtggaatttttagggaacagttataatgatatttcactgaatatcaacaaaccgctcaacatttactctgaaaatcgtattacgttaaacgcgaaatcaatgagtccagtatttaaagttctggcgtctgatgtgaaaatttgtaacctgtccattgtgggcaacagctatgatggcattgagattaacaatgctgtgaacgttgtaatcttcgaaaacaatattctgaaccgtttggaccagtcgaaaatcggtgaatatatgttgagcaccatttcgcttcccgggtacgggataaatgttatcgactcaaaaaatgttgaaatttccaataactcaatcaacacctttgaaagcggaattttcgtgtccaacagcaataacctgagtattaactccaatgtgctgaaagaaaataattatgggatcaagtatggcttcaatgtttcaaatagcaacatcacaaacaatatgatcagcgaaagcatcggcttatacaccaatctggtgccggagggtccgcgcggatatggtgtctttttaaataattctgcagtcaacgtcaccatcgcgaaaaataatattagctggaaccatctcgggatctccattgatgcaaattattccaccggtatcttaatcacgagtaatctgatctcggataacgtccttgagggaatccggtttaatgaaggttatgatttggcgaaaaacgcgattgaaccggtggtgactgacaatgccatctaccgcaatggccgtggtcccagcatgatgattctgggtgaactgagtgccaaccctgcaggaatttatggccctggtgcctttaacgattctctgaagctcaagctgggcgctaattggtatggtaaaaacctgattgtgacctgggataatgacactggggtggttggttatggcaccatgtgtccgcgtattaataccaccggaatcgcctttaaagagataacgtgcgtgaatccaggtacgtacagcattacattttacaaaaacgatgaagtggcctcaaaattgccggtctttaacatgtatgcgacgttaaacgacaatgtggaaattgtgtttgacgtgatcaacggtgttggggtgtttactttcgatactcaaaaattcacgacgggtgaaaacgtaattaaagtgtccagtggctcgctgaacgattctgatcgcatctttaaagtagagatgagcaagaccctggacgatagtgaagttccgatt

SEQ ID NO: 77123 - DNA, 33 bp, synthetic construct
  source 1..33: mol_type = other DNA
aacttcccgtacaccaaatggctgtattttgcg

SEQ ID NO: 77124 - DNA, 177 bp, synthetic construct; identical to SEQ ID NO: 76593
  source 1..177: mol_type = other DNA

SEQ ID NO: 77125 - DNA, 732 bp, synthetic construct
  source 1..732: mol_type = other DNA
cttactggttcagtcgggacctccaatggagacctcaatggccaggatgtgcagctggccgcggcagccagcttgaaaaacgtttacgatgaaaaactgatcccaatgtttgaagaaaaatatccgggtgtgaaagtgacccctacgtatgcgagcagtggggacctgcaaaaacagattgagaatggtctgaaagcggacgtgttcatgtctgcgggcaacaagcagatggatgcattaatcaacgaaagttatgttgacaatgattccaacgtgaaatttctggagaacaagcttgttctcatcgtaagcgcagattccaatgtgaacgtctcttcattcgaggatctaaaaaatgtcaatggcactattgctattggtgatcccgaatctgtcccggccggccagtatgccaatgaatcactgcataacctgggtatttgggacgatgttgaaagcaaactgtcgttggggaccgatgtcacagcagtattaaaccaggtggctcaaggatcggcggactgcggcctggtatacacaaccgatgccaagagtagcgatgaggttaaagtaatttgtgaggcgccggaagattcgctgaaagacatcgtttatccggtggcgccaataaaagatagcgaacacgccgatgcggcaaacaagtttatggagttcttacaaacgccggaagctcagagtgtgtttgaagactacggctttacgattcatgaa

SEQ ID NO: 77126 - DNA, 69 bp, synthetic construct
  source 1..69: mol_type = other DNA
tttggggttcgcggcccgattggtagtttcctgattgatttctttgcggtgaaaatcgcctttagctgg

SEQ ID NO: 77127 - DNA, 81 bp, synthetic construct
  source 1..81: mol_type = other DNA
atcgccggtaacattgcaggccagacccgcacgctgccgatggcggtttatagcgaagtggctgcgggcaatatgggggat

SEQ ID NO: 77128 - DNA, 33 bp, synthetic construct
  source 1..33: mol_type = other DNA
gtggccggcctgggtccgaccgcgattgcaggg

SEQ ID NO: 77129 - DNA, 57 bp, synthetic construct
  source 1..57: mol_type = other DNA
ccgttactggtgagttacggcgccagcggtcagaccctgaacgaagcgattgcatat

SEQ ID NO: 77130 - DNA, 33 bp, synthetic construct
  source 1..33: mol_type = other DNA
agccaggtgggcggtgattatgggattgcgacc

SEQ ID NO: 77131 - DNA, 63 bp, synthetic construct
  source 1..63: mol_type = other DNA
ccgttaagcaccttgtttgcctatacgccagaaaccactaacctggtgccgggcattgcgctg

SEQ ID NO: 77132 - DNA, 1113 bp, synthetic construct; identical to SEQ ID NO: 76601
  source 1..1113: mol_type = other DNA

SEQ ID NO: 77133 - DNA, 129 bp, synthetic construct
  source 1..129: mol_type = other DNA
ggcactggcgggatctatccgatcgaaattatgcaggattttttccagaccttatatccgtacttgccaatgacgtatgccattaccctgattcgcgaggcgcaactgggtgttgtgtggagcaactac

SEQ ID NO: 77134 - DNA, 78 bp, synthetic construct
  source 1..78: mol_type = other DNA
ttctttaatgcgtcgttattcaacacgtatagctttcataccatttccgaactgggcatcccgaacgtgaatagtcca

SEQ ID NO: 77135 - DNA, 36 bp, synthetic construct
  source 1..36: mol_type = other DNA
ggcatcattaccgcggtggggggttttaaactgggc

SEQ ID NO: 77136 - DNA, 345 bp, synthetic construct
  source 1..345: mol_type = other DNA
gcatcttcggatgagatcaacgatggcattgcgatctctggggttattattaaaggtaacgacatagttccggttgacactatccggagcaacgtcatgcaggccggttttcgcgatggcagtgtaatttatggcgatattttgaaaacgtccaaacgtgaagtgtcactgcaggacgcgattcagacggcccaagaatttgcgacccgcagcacagtgccgggtacatccgtccagccaatcacggcagctgatgtgcaagtggataagaataccggggtagtgaccgtcactgtgatcgaggatttcagctcggttgaactggacaataaaaccagtggcgga

SEQ ID NO: 77137 - DNA, 1098 bp, synthetic construct
  source 1..1098: mol_type = other DNA
gcgacttgcaacattatagttatcaccgacccgtcgggtaatgaccccaatggtgcagctgcgggcagcatgtcgtttgccgataacatgttccagtcaaccttcctgctgtctcgttcgaatcatttcgctgtcctttctggagggaccggtagttcagacacgcggttggattcgatcgtggacgccgttgccagcctggaaaacaacgcgtctgcagcgagcgcggcgtccctggcgtctcaatttaagggagcgcgtctcgttgtgggcggtccgaatattggggctgcggtgggaggtagctttaatgcatatgtcattacagttgacgatagcagcaatgatattaaagtaaccccttacaacagtggtgtggccacattgcagccgggtcagaaaggagctattatccacctgcgaaataccgcgggcaaccccctgtatggcactgccgattctgtccgcaaggaaacggcaatgaatattggtaagatgatccgcgatgggtatcctgccacgacgatccttgctgaagctatgggcgaagtggctaaagactctggtgagaaatatggggggggcggcgtaaacctcgtctcaggcatctccacgtccgatatgtttacaccaaaagaattgaacagtaccggttatccgatggacgaagaatactccaaggtttgtgatagctgcggctgggcgatggggtttccagcggccgaagcctatgaaaaatgtccggtttgcggcggcgatctacgtactgtctacgcctatcaggcactgggggatgcgttaaccgtgagctcgaaagccgtgagtgtgtcagtctatggcagtgatcgtccaggtttagcagaaaccacgaaagagatcgtggaggcatccgtgagtaaatatggctacgatgcaagcgcaatctcaggcagcattaaccgcggtattaacaatggtctgctggtaggcgttgaccatgttgagccgaaagacattaatgtaaaacaaggttccaaagccgtaggcgtgtactacaaatcactgccgagtgagcgcagctcgcctgcgtgggatttaccgatagatggaaacattctg

SEQ ID NO: 77138 - DNA, 39 bp, synthetic construct
  source 1..39: mol_type = other DNA
caggtgtatttaatcagccaaattcagctgccgctgacc

SEQ ID NO: 77139 - DNA, 264 bp, synthetic construct
  source 1..264: mol_type = other DNA
atgttgcaagcaaaaaaaacgatcaccgtaactgttaaaagcatcccaacatccctgaccgtcaatgatctgacctgcaactacggggaagataactcgtatttatatgcgactctgaaggacacgaaaaacaataaattcctcaacggccagaccatcacgtttaaaattaatgacaaaattataaacgtggtgagtgataataagggtcgcgccaagatcaaaattgatgagaaaccgggcctttacaatgtgattgtttca

SEQ ID NO: 77140 - DNA, 432 bp, synthetic construct; identical to SEQ ID NO: 76609
  source 1..432: mol_type = other DNA

SEQ ID NO: 77141 - DNA, 60 bp, synthetic construct
  source 1..60: mol_type = other DNA
aaattctatagtatcgattttaacggccataagagcgaaaccaaaacgtgcaattacatt

SEQ ID NO: 77142 - DNA, 633 bp, synthetic construct
  source 1..633: mol_type = other DNA
ggccgcggctttaccacaatccagtcagcaatcgatgatagcaacacccataatggtgatatcattaaaatcagtgaagggctgtacaatgaaccactcactgtgaacaaattcgtgactatgattgggattaatgcgacgctgaccagccgggacccgtcccgtccggttattggcatcacgggcggtgggagtaacagtgtgatttatggctttaaaatcaaagactcggagcacggtgtggtcatttatcatgcagataatgtttctgtaattaataaccaatttatcaatgtggttaagtctatagaaattgacgatgacaaaaatacccttgtggcctacaacagcatcgacagcgataaatttttaaatttcatgtcgggtgtcgctatccgtaaatcagataatctaatggtttttaacaacaatatttccctgaacagcgatacgggtgccggcggaatcgtggtaacaaatattacgtcaaacaatatttccattgttaataatcgcataaccaacaagaacaacctgaatggcattggattgtatgtcatctgctccaacgtaagtattgattctaacaacgtctcgaacttcaacgcgggtctgtacgttgtgagctcgaat

SEQ ID NO: 77143 - DNA, 462 bp, synthetic construct
  source 1..462: mol_type = other DNA
aatgagtttaaaaataataatcacggcgtgttcttacgggtctcagtgaacaacacttatgcgtttaacaatatccatgacaatatactgtgtggtttcgtcctggatacctctctgctgtcgtataatgattcctgctacctgaaccgcttatgcgacaacagccagtacgatttttacagtgaagccaacagtgattacgtgattaacgataattggtggggtgagaacaccccgaagattagtatcaatcgtagcattcttgctaacatttataacgcgacaggcaatgtaattatgaacagctggatggttgcacatctcttttccagctcttataaaattaatgaaaacaacaacatcgaacgcgccaaattctatgttgatctgacgtacaataatatcggaaacgacttgtcatataaagggtatatcccaaacaatttgaaatcgtttattggc

SEQ ID NO: 77144 - DNA, 186 bp, synthetic construct
  source 1..186: mol_type = other DNA
gttgatttcgagttaaatgatttgtttaaaaaccatgaaaatatcaccgtcatgtccattttcgacaacgtgaaaatactgaacagttttaacaaaaaagtaactattgacatcatgctgttttcgtctgcgtgggattttgaaaacaattattttgtgaataagacgtaccagattccgttcagc

SEQ ID NO: 77145 - DNA, 1194 bp, synthetic construct
  source 1..1194: mol_type = other DNA
acattttgctggtctgaaaccggcctgtttacgggtaaaatttatgtaatcgttaatggtgagatcctggatgaaattaatatccacaacctgttttatcaaaaatttaaaaacaactactccaccaatgtgtttgaagctattaagttgctggatacggtgtttgccagcacgaaagaaggtgtgtgggcacctaatggttattacttctcctttgcaaaagccgctaacattgactttcgagattataactctgtctataatcgctttctgaactacatcaaactctattatgatttaaccgactcggatctgaatttcgtgaaaaattataaaggtttcttcattgattttatcgatatgacaattgatttccatggcgatatgaccccggatatcaacttcgattataacggagtccacaaacttttaaagcccccatcgagctacgcgcatcgtatatcaaacatctattacacggatattgaagatgaaaacaacattagcattggctacgagggcatgcgcagttttgcgattgtaaaagacaatctgaccaacgatgacttgcagttctggctgaaccagaaagagctttacgctccgggtctgatgaaagccgcgtacggcacttttctgacctccctgctggtgatttatgaaaatgaccgtgtggcggatgaatcggccatcaaatttaatgtgacttggtcacgtatttcaccggtttgcgtttccttgtgtaatgactataattgtctgtatgttactggggagtctgatcacggaatgggtcgcgaagcgatcggcaatattagtgacgtctggaagttcaactttgcaaccagcttcagcttcagtctggtggagcagctggtcgggaacaatatttggaatgacacgaccatagggagtgttacgcttggtttaatcgaaagctactttaacaatgaaaccatggaaattttcacctcgaacggctacatatttatcaagtgtgagaatgacggtaacacgttgctgttcctcgatctgaagactggaatcgtacgggactacttcagctattatggcctccttgggacaatgccgtgctaccatgacaacattacagaaaacgcgtggaaatatggcaacaacctattaaataatatgggcagagaatttaacgatttaaaaaatatttttggcatc

SEQ ID NO: 77146 - DNA, 312 bp, synthetic construct
  source 1..312: mol_type = other DNA
ctgccaattatcatgtttcttttcccggagcaggttaatgaagtatggatgaacttcgcgagcttgtttaatccgtactacaaagattatccggacattcccatttatgaaaatacctatccggccaacatcatcaaccctccgaaactggtgttagacggtaaatcatccgacgattatattatttcgcaactgaaaaacaatcgtaactttaacaataagtataaacgctacaattctaacgtcaataaggataacatcaatttcaaaataaaaatcgggcctattccgagtggcaaaggcccaaaggat

SEQ ID NO: 77147 - DNA, 180 bp, synthetic construct
  source 1..180: mol_type = other DNA
ggtaaatatttaaaagaactgtacaaaaattataaagacgcgaaaagtaaaggcgaagtgctgaagttcgttaagtcgaacattaaagaactgtttgccctgtccttgtactttgagagcattgagaccgtcaacctactgatcaatcttttcctctatgaaatcgaaaaagataagggg

SEQ ID NO: 77148 - DNA, 726 bp, synthetic construct
  source 1..726: mol_type = other DNA
gtgtccgacaatgtagtggagaatgacacgctgagtgttgattgtcaggtaggagaattgtgctcggatactattgaagtgtccagcgacaactattacattgacaataatgtcgtaaacagctcagatattaactttacagatgtctattccggcaatgtggtgaaaaaagttaaatctacagttaaaacctcgattacggcgaaagatataactaaatattttcaagatgggaccagtgttaaggcctatctcaaaaattcaaatggtaaagtcctgtctggaaagaagatcactgtgacgtactctggtaagacttactcgcgcacgactgattccaagggttgtgtgagctgggacgttaaaaaagggcctggcacctactcggtgaaattttctttcaaagcgagtggctataaaagcagcagcaaaaccgcaaaagtcaccgtaaaagctatgccgaccaccttaaccgccaacaaccttgtgtttacctatggtgataccaacaataaactgaaagcgacactgaaaaataaaaaaggcaaatcaatcgtgaacaaaacagttgttttcaacttcagtggtaaaaaatatattaagaagacgaacagcaagggcgtcgcgtgcctgacgatcacggcaaaaccaaaaacatacccgacggccatctcatttaccaacgctaattacgtcaccagcaaaaagaacaataactccaacagt

SEQ ID NO: 77149 - DNA, 4134 bp, synthetic construct
  source 1..4134: mol_type = other DNA
gcagacctcaacgagagtgacaaattggggtcgggcgtgaacgtggaagataaactagaaaattcgcagaaaaataaatcaatgtcggacacgaatcaaaatcccgccttaaaagccaagacttattccgtaaacggaggtacgtttcgtgatattcagaacgcgattgacaaatcaagtgcaggcgataccataaaactgagcggcaaattcgttagcaaaggtgacgacaccatctcgatgtcaaagaaattaaccatcacttccccatcccaggccattttagatgggaaaaatagcaccacaattctcaaaatctttaccggcgcaacacaatctaaactgtcgaatctgagatttgtaaatggatattctgacagtaaaggcggtgctattgtaatttcagctaaatccatcgccttcgacaagtgcgtgtttgaaaataactatgcgaatttaagctcgggcgccatccacactccctatcgggccatagctacacagggtatgctgattaaaaattgtaacttcaccaataatggtgcgggcattgccgcgggcgcgttaggcatcttcggtcatgattttttaattgagaattgtgcgtttagttcaaactacgtgaagggatatggcgagtgctatggcggcgcgatccagatcggactggatacggaaccgtcttatggtaatgtgcgaaactgccgcttcatcaataacaaagcgatctccagcacgggcctgggccatgcaggcgcaggctgtgttcgcaacggttcgtcctattataactgcattttcattaataatagtgcggattggggtgcggctttgacctatcatgccagcggcaacctgaacaactgcacgctgatcaacaataccgccactaaatacggtggtgcggtcgctattatgatgaactacctgaatttcatgaatctgaatattaccaacagtatctttaaaggcaacaaagcgcctctcggtggtgcggtgaaattggatgggctcaatatcaaaattgaagaatccaccttcgacgataactacgcatctgagtatggtggggcggttaacatcaatgcgaccaatgtgaaaatcataaattctaaattcaaccgtaacattgcaaatattgatggtggggcggtattcatcaaaggtaaagacacgaccgttaagaatagcaagttcatctccaatgaagcaatacctgacgtgaaaaaactgaatgatggactggggggcgctatttatgtgaacagcaccaaagtgcttgcgcagaacaacgagtttaaactaaatacggcccgcaacggcagtgccatttactttgaccgtaacggcctggaatttaagctggtgaacaataccttatatcaaaatcaggcgtgggtgtacaggctgccgatctttgctcacgatatctactacggggagtcagagaacatcaaatccgtaatctatggcgggaacaacattgcagacttcgataacctgaaagtaagcaatgcgatttataacgccgccagcaataacaaaatcgaaattgatggggaacacccagtgctgggcgcaaccaccagcggtaagctgtatcaggatgaccgtgaatacaacgtgcgggtattgatgatggtacgtcacgaagatggcacgatcgtctacaacaactctctgaacacgaactatctcggtgcagtctctgggaagctggataacctgaagccgggcaagtattacgtgaccgcaaaacacttcgaagataactactacaaggccattgccaataccaccgtattcaatgttcttccgaagactgataataaaatcctgaaaagcagtaatggaaactcaattgcgtataaagacacagtcatctggaccctgaatattaccaacaatggtccgaatgatagcaccggggttgtcgtatatgacgtccttccggagggccttatttgggtaaacgacgacagtaacggagcatataatccaaaaacgggggttctgaccataggatcgctgaaagttggtgagaccatagtgttaaacatcatgactaaagtgaatgcaactgggaaaatcgtcaacaaagcgaatgtcacgggaaatgagtatgacattaacctggacaataaccatgatgaaaaagaaatcaacgtaccgccgacggtggatctggccataattaagaaggtcaatatcaccactccaaactatggcgattcggtgatctggacattaacagtttctaactccggtccggacgttgcccacgatgtaaaagtcacagatattttttcagatagcttaatttggattgaagacgactctctgggcaaatataatccgaaaacgggcatttggaatattggcactctgaacaaaggcaaaaccatcgaactgaacattgtctcacaagttaaccagacgggaaacatcaccaacaatgtttcggtgacatctcgtgaacatgatattgacctgagcaacaacgtcgcaaataaaacgatattcgtgattaaatccggagatctgtctatcctgaaaacagttaacgtcagtgatgcgaattatggtgaaatcgtgaaatggactctcacggcgtataataatggtcccaacaaggtgaacggggttaccgttcaggatatccttcctaaaggcttaatgcttcttaactacacggccagcaaaggcttttacgatgatggcgtatgggtggtgtgctgtcttgaaaaaggcaaaactgaaactttggagctgatctgtaaagtcaaccgcacaggcaatattaccaacatcgctaagatctccggcatagaatatgatcctaatctggacaataacctcgacaacgaatctattattgttccgcctgcctcggacatttccgtcatcaaacaagttgacagtaaaaatccgtactttggagatattataacttggattattgaagttaccaacaagggtccggatcgtgcaactaacattcgtgtgaccgatgaattgccggaaggtctgatcttcaaagactacgtttcaacgtgcggtgtttaccagaacggtgtttggttcctcgattacctcaatgcaggtgatagcgaatatctcaatattagttgtcatgtcgggcaattgggcattatcgtaaatgatgtgtcggccatcgccaacgaatttgacattaacctgagcgacaatcactataacgagagcattaacgtcttgccagtctcagatctgtcaattgagaaatttgtcaatgtgagcaacgctaactataaggatttgatcaagtggacactgatagtgtccaacaacggttttaatgatgcaaccgatgtcgtggttgaggacattctgccggatagcttagagtttatcagcgcgaatggggattacgaagagggtatttggtatgtgggtgatctgggcgttggtaattcaaagaccctggatattgtgacacgcatcattaaaaccggcgacatcaccaacgtcgccgcggtatattgcagtgaagacgatcccgatctgagcaacaatgaagcggaggatacggttcatgtggggccggcagctgatttgagcattaccaaaacagtgtctaaacatgcatacgaaattggccagatccttacgtacaatattaatgtaaacaacaacgggcctgatgatgcggtgaacgtgaaagtgagtgaagagtttccgaaatcgctgcatctgaaatcctttaagatgtcagctggtgaatttaatgcgtacagcaacgtgtggagcattgataaacttgccgctggtggtgaggaaaaactacgcatggaatttgaagcgttgtcggaaggcatctttaagaacacggcttcggttgtcagtgatacctttgacaatgatttgaataataatcatgactcggctttagtgaaaattattgcgaatacgagcgataaaattatcaacgatctgactgataacttcacgaaaagtaatgttgtgaaagcggaaaatatcaagcagccagtttactgtcttgaaaaacactctacggccaatttcatagaactgctaagtatttccgtcattgttagcatgatttttggcggaggtgatatttttcgcaaacgc

SEQ ID NO: 77150 - DNA, 987 bp, synthetic construct
  source 1..987: mol_type = other DNA
gcgtcaaaaacggcgttcattacatcggataatctgatcgatgaaaaaacggataccaatatgctcaatagcattaagaactatgtggaagagatctctaacggtgagattcaagtgatcgtcgataacgaagctccggggcctggagaaggttggcgcagcataagtgtaacctctgatgtgtcgattgacatagcagcctcagatgcgggcaactacatccagctggcctctgcagccactgcgggaaacaagcagattatctttattaacactggtgatttcgacttggataaccattctaattttttgcggcgcgcttgggatgacaattattcaaatgaatccctggcgggcgtgcgtgaccccggcaccctgctgaacaatgcaggcatccaatacatccagctggcgaaagactatccggacaatattgataacaatggtcttctagataaatatgatgataaaatgaaccacgaaatcgctgagaagatcgtcaatattgttaataactatgacaacagtagcaccaaggaactgagtgacaatctgatcgtgaagaacaaaatatccccaaaagggatggcggatgcaagcaaaatgcttgttgaaagtggggataaagaaatgaacggcccatacggttcctattccacgccgcaattactgtaccagaccagcacctacctcaatggtgatggtattgacattcctaaagactataaaaaaccggacaacccgctgggcatttcatttttaaccaaagacacgtactcggtttacgactatttcaagatggccggcattgtcaaaaactatatggatgcgaatggcaaagcaccggattcgattgagtatgaaggagcccatatcagctactacgatttaacatataatttcgctaaaatcgttcagaatcatactgatgccaaccacatgggctttgaaagcgagtatcactttgataaagtaaacgatagcatt

SEQ ID NO: 77151 - DNA, 84 bp, synthetic construct
  source 1..84: mol_type = other DNA
aactccgcgccggttctgggcggttatgaagccaccggcttagggcagaacggatttggctcggcaagcagtgtgggtctgaat

SEQ ID NO: 77152 - DNA, 60 bp, synthetic construct
  source 1..60: mol_type = other DNA
aatccgacgttaggcgcaaactttatcactttcggtgccaccgcggtgattctgcaggct

SEQ ID NO: 77153 - DNA, 33 bp, synthetic construct
  source 1..33: mol_type = other DNA
tatattggcgtggcgccggatttagccatcctg

SEQ ID NO: 77154 - DNA, 42 bp, synthetic construct
  source 1..42: mol_type = other DNA
ggttggggcgttagcacctttccgtacagtattgggtatgtg

SEQ ID NO: 77155 - DNA, 54 bp, synthetic construct
  source 1..54: mol_type = other DNA
ttaaacccactgattcgcccggtgacccatttgtttctgatgggcagcagtaaa

SEQ ID NO: 77156 - DNA, 192 bp, synthetic construct
  source 1..192: mol_type = other DNA
tttcgcctgcagatgggcatcaaacttaacaccgtgttttgctcgatgtccagcacgatgagttctacgagtattctgcatacccacttgctgaagtcaattctgggtgaagtattaactaaaataatcgggccattcattcaaagcaacatcaatacaggcgttggtctctatgcgtacgtcccggatatt

SEQ ID NO: 77157 - DNA, 216 bp, synthetic construct
  source 1..216: mol_type = other DNA
gcgtttgctggtgcagaaccggattattacaccgtggaaatcgtcaacatgaccgataacgttgatttcggcgacattccgattgagaaaatcagcaacgaaacgtatcatgtagactccaactataatgagatggaactgattaatgatttgaaagtgccattaaacaatagttgcaagtactacactgtttcttggaatgcctattcgtatctg

SEQ ID NO: 77158 - DNA, 33 bp, synthetic construct
  source 1..33: mol_type = other DNA
attggttttagcaccgtggatggcgggccgttc

SEQ ID NO: 77159 - DNA, 45 bp, synthetic construct
  source 1..45: mol_type = other DNA
gcgacctgggataacatgtggggtttaggcagccagacgctggac

SEQ ID NO: 77160 - DNA, 42 bp, synthetic construct
  source 1..42: mol_type = other DNA
accaactttggccagatcacgaatttcattagcattaacccg

SEQ ID NO: 77161 - DNA, 1380 bp, synthetic construct
  source 1..1380: mol_type = other DNA
gacaatacggaaagtgacatcattggcgccgatgggctgaacagcaccagcaatatacccatggatgctccgcgtacctttacgcagttaaacgaagcgatcactccgtacaccagtattgatttggagcatgattaccgctacgataatgagacagattccgaatttgctaatggcgtgccgattaccaagaacatcactattgatggtaaaggccatacacttgatggcaactatctggcccgtatttttatcattaaagaagattgtacggcagtgtttaagaacattaacttcattaacgggaaggcaagcaccaatggcggagcgatttatggagtgtgcaatgcggaaaactgcaacttcctgaacaatactgcggtaaaagacggtggggccatccatctttctaacgccaataactgtaattttatcaacaattacgtactgaatggtcgcgggggcgcaatgtataaaggttatgcaacaaactgcatatttactgacaactcggcagtgactggcggcgcgctctttgaaaactctgcgacaaaatgtaagttcaccaataattttgccaaagagaatggtggcgcactatatggaggatttgctgttcagtgtaatttcaacaagaactcggcgaagaataatggtggcgcactgtataaaggttcggcccactactgcaatttctctgataactatgccgtgaatcacggcgggggcatgtatggaggtgccggtgagtactgcttcttcaaaaacaatgcggccaaatcgggtcatgacgcgtaccggagctccctgaaaaaaactaagaccacgatctatatcaagcctacgactacggcccattacggtgactatgtagttataaccctgaaaaacattaaaaacaaagtcgtgtctggcgttaaggtcagtgtttttatcaacggtaaaaaatatgctacaaaaatcaccaacaaatatgggcagatcaaaattgacacccgtaacgggtttgtgattaaaaaatacacgattaagtcaaagtttgcggaagattccaattactacgcgtcaagcaaaaccgttaaaattactattaaaaagtcaaccccaaaaataacggccaattcaaaaaccttcaaaaagagcacgaaaatcaaaaaatacagcatcaccttaaaaaccaagcaaggcaaaatcatgaaaaacaaaaaaattaccttgaacgtcaatcaccgctattattatgcgacaaccaattataaaggcatcgcaacgtttaaaattaccaaactgctgtataaaggtaaattcacggctacaacgggctacgctggtagtaaatattacaacgcgctcacgaaaaaatccaccattattgtccga

SEQ ID NO: 77162 - DNA, 36 bp, synthetic construct
  source 1..36: mol_type = other DNA
attatccctctgccgtggaccccagtgccggttacg

SEQ ID NO: 77163 - DNA, 51 bp, synthetic construct
  source 1..51: mol_type = other DNA
attccgtggttcggtgggatgaccggtggctttgaaacgctgttaggcagc

SEQ ID NO: 77164 - DNA, 36 bp, synthetic construct
  source 1..36: mol_type = other DNA
aacctgacgcagggcaccagcgttggtattgtggat

SEQ ID NO: 77165 - DNA, 156 bp, synthetic construct
  source 1..156: mol_type = other DNA
tacttctactcgtcagacaactttcacgagtctgattccagcctgaatgaacgccatgatgacgtggtttatctttggatgttggatgataacggtaaattaaaactggtcccgaccacggaaacttatagcgaaggcagtgcgagtgatccagac

SEQ ID NO: 77166 - DNA, 1095 bp, synthetic construct
  source 1..1095: mol_type = other DNA
ttggaaaacaaaatcaacgcggggtacggttccacaatcaccctggaaaacgactatgaatatgaggagtctggatacagttctgggatcgaaattacgcaggatataaccattgatgggaaaggtcatacaatcgacgccaaaggccagacacgtattttcgatgtggaagcaggcaaggtcacactgaagaatattacgtttaaaaatgggatgcaaaacttctttttcggtggtggcgccattctctggaagagcctggatggaatcattaccaattgcacttttatcaataactatgcgccgtccggtggagcaattcgcttggaagcctgggacaacaccatatcggactgtaccttcatccgcaacacggccaaccaaggcggcgctatcaacctgaacaccacgaattacgctagcatttccaattgtgttttcgtgaataacgacatttactcggtgcagggtgatggatgtaaaattaacaacaatattttcatgagctgctcaattggttttgactttacgcggaactataacattgataacaattggtttgggaacaatgcgagtaattatacctataaaccgaatgagttttgcaacaattggctgttcctcaacgcgaccacagatccgaacaccgtcagcgtttcaaacactgcagacattatctttaaactgtatgcctataattcaaccagcggcaacatctcgaaatacgataacgcgccatttaaaaatcttaatctgacaatcaccgcaaccaatggtaatattgataagaatattgcgaaattaggcgaaacgatcaaatataccgcttccagcgtgggcactggcaatgtatctgcgaaagtggaaaacgtagagtataccattggcctggacatcattccgatagaaactaagctgatccttaactcgactgatacgattattgatagcatcagtacggttggcatcaatgtaaccgatattaataacaatcccttaagtggtgtcgttaaactaaccatcaaagataacaaaggtaatgaatacaacactaccgtcacggtgaaaacgggcattactacgtacatataccct

SEQ ID NO: 77167 - DNA, 1161 bp, synthetic construct
  source 1..1161: mol_type = other DNA
aatatcactggtttttatctgggcaatgatactctggggtatgttgattcgccggtagccgaaaccaagtttcgcgttgataaactgaacgcgaccgtcaaccttgtggtaaacaattacacaatccggaacttctccgtaaacattaccgtgacgggtaaaaacacggaccgtattgtcgaaaatggttccctgatcatctatgcgaatcgcgaaaaaattgacgagataaatattacagatggtaaagctgaaaatatcctgctgaatatcaccaaaataggcaattatgaactttcagttgcatatagtggcaataacgtcttcaatgaaaacaatacgttttccaaaaatgtgacggctatcaaaatcagtaccattattagcgcgaacaacattatcaccacttataacacggataaatacttagagattacgctgttagatagtgaaaaaaacccactgaacaacgcaacactgtcggttgacttgaatggggctaaaaaatacaccacttataaaaatggccaaattaaaatagcgctcggtagcctggtgccgaaaacatatactgccaaagtgtcgtttgccggcaatgatatttatagcccgtattctaccagctttaaggtggtcgttgagaaagcgacccccaccatcaccgcaaaaacaaaaatctttaaatttgaggacaaaaccaagaaatacacgatcactctcaagaacaacaaaggcattgtcatgaagaacacaaaagttacgttaaccattaatggaaagacctacactgcaaccaccaacaccaacggtgttgcgacgttcaagtttaacaaattgaacaaaaagggcacgtatacggcgtctatcacctattcaggggataagtattacaacaaactaatcaaaaaagctaaaattaaaattaaagcccctgcctggaaaaccgtagcaaaaggtagcaaaaataaggcgattgtgaagaaaattcaaaagacgttgaagaacaatggatactacctgaagtacaatggccgttacctgaaaatagatggcattttccagaaatatacccagattgccgtgaaacatttccagaaagccaataaacttaaaacaactggaaaagtggactacaaaacggcgaaaaaactcaaaatcatt

SEQ ID NO: 77168 - DNA, 48 bp, synthetic construct
  source 1..48: mol_type = other DNA
atggcggatcaaattgccaccttgatcagtagcgtgggcctgacgcag

SEQ ID NO: 77169 - DNA, 42 bp, synthetic construct
  source 1..42: mol_type = other DNA
agcggcctgctgggtggtggccaggggttgccgaccgaagcg

SEQ ID NO: 77170 - DNA, 81 bp, synthetic construct
  source 1..81: mol_type = other DNA
tttattggcgatttccctgagcgcatcgccggttttcgtctgccgaccgtttttgcaccagtggaagcgttcaaacatccg

SEQ ID NO: 77171 - DNA, 51 bp, synthetic construct
  source 1..51: mol_type = other DNA
ccgggcatgccaacgagtaaaaccctgttatactatgtgagccaggttgaa

SEQ ID NO: 77172 - DNA, 45 bp, synthetic construct
  source 1..45: mol_type = other DNA
ccaatgaaaattccggtggcgaaaggcgttgaaatcagcattatg

SEQ ID NO: 77173 - DNA, 123 bp, synthetic construct
  source 1..123: mol_type = other DNA
agcgtcatcccgttacatccttatgcattcgctatggcctcaggtgtgggctcggccagtatgaacgcggcctccctggctccgacggttgcggcgtttccacagctggcaacccaaattgaa

SEQ ID NO: 77174 - DNA, 45 bp, synthetic construct
  source 1..45: mol_type = other DNA
gtgccgcagccagccaccccgacgatcggcgcgattttaaaactg

SEQ ID NO: 77175 - DNA, 45 bp, synthetic construct; identical to SEQ ID NO: 76644
  source 1..45: mol_type = other DNA

SEQ ID NO: 77176 - DNA, 39 bp, synthetic construct
  source 1..39: mol_type = other DNA
attagttttaattgggtgctgaacagctatggcaactta

SEQ ID NO: 77177 - DNA, 99 bp, synthetic construct
  source 1..99: mol_type = other DNA
atgtataacaactacatggacgatctgggcggtgaaattaaaagcaaagaagttaacgagtttaataatcagctgaatgcgttaaaggtgtatttcaaa

SEQ ID NO: 77178 - DNA, 51 bp, synthetic construct
  source 1..51: mol_type = other DNA
tactccaactttatgcagagctatggcatggaatcggagatgattatcagt

SEQ ID NO: 77179 - DNA, 36 bp, synthetic construct; identical to SEQ ID NO: 76648
  source 1..36: mol_type = other DNA

SEQ ID NO: 77180 - DNA, 42 bp, synthetic construct; identical to SEQ ID NO: 76649
  source 1..42: mol_type = other DNA

SEQ ID NO: 77181 - DNA, 450 bp, synthetic construct
  source 1..450: mol_type = other DNA
acgggcagcaccaataaatcttcgccgattcaaaatgtggacaccgagaaatatagcgccggctcattttcgttcaagtatccgggtgactggcaggagctgaaccaaactgatgaagagcatccaggagctattttttataaagccgcaaacaacaccactgttgaatactacaatgtcagcagcagtgcgtcaagtttgaaagaaattaaccagaatcgcatcacacacgctcagagcgtaggtgcgagcgtcaccctgcttgaaacaatcaccttagatggtcgcaatgcgtccaacattatcctcgaaaacgccgatgggaactacacgcggtatgtgtcaatgtttagtaatggcgaactgtatgtattccgtctgtctggcgattccgttaattccattacgtcggatgaaattaatagtgtgatcaactctgcagacatagcg

SEQ ID NO: 77182 - DNA, 72 bp, synthetic construct
  source 1..72: mol_type = other DNA
gcgacgttgggtggcagtctgttcggtatctttggcgggttaactggctttaccctgtccggaattaccagc

SEQ ID NO: 77183 - DNA, 45 bp, synthetic construct
  source 1..45: mol_type = other DNA
gggtatctgggcacgtttaaagagggttttttcactaccgaaaac

SEQ ID NO: 77184 - DNA, 318 bp, synthetic construct
  source 1..318: mol_type = other DNA
gtgggctacagtatcgtctcatccagcatcacgaacgatatatcgtcggggacccaatatgacgagcttgccgaactgaaagctgaatacagcaatttgagtgtaaaatttgataacattaaatcaacttactatgcaggtgatgcggacgatgttaaggtttataacgatgcgaaactcgagttatctcgcgccaattccgctattgaaaatgtccagagcgcgctggacgcagacaaaccgtcgaacgatgtggatagccgtattgtgttcgcaaaagaaaaactggaatctgccgagaaggcgtataatagtctg

SEQ ID NO: 77185 - DNA, 540 bp, synthetic construct
  source 1..540: mol_type = other DNA
catattttttttggaatgcctctggaattttatacggagggggatgcaacctaccacttatctcagttcaacaaactggaccttgacggtgacggcaatctaactttttatgaagtcaaaggtttagcgtcagatatttcgcaggacaacctcagcgggattttcgatgccgccgataaaaacaacaatggtgttctgaagggctctgaatttgacggctacctgcagttcattgataaatattataaagaactgggcaagcagcaaaaagctgaacgtaaaaattccgcacaacaaaaaagtagctcgtcgtccagcagctccaacccaagcttccaagatgagggccatgaaatctgcccggtgtgtggtggaaaccagtttaccgaattttacaatagtcagtatggggaaatgaattggcagtgcgattactgtggtgaaatctttcgcagtgatgatgagttctatattgactactgggaatcaaacggcattaagtgcatattgccggcgctggagaataatttggatatcatc

SEQ ID NO: 77186 - DNA, 138 bp, synthetic construct
  source 1..138: mol_type = other DNA
gatacctattttggcctgccagagcaaccgggtgtgcgtggggcggggatcatcggtcaggatgttgaaaaacgcggcggcgacattgctggtggctttttccagggaaacattacgtgcagcccggatgccagtgca

SEQ ID NO: 77187 - DNA, 270 bp, synthetic construct
  source 1..270: mol_type = other DNA
ctcaatcctgaccagctgtatgtccgtccggcgccgcaagagcagattggcgatggtcttagtattgccccgtatgatcgcggtggtgaagtgctgactcaaccaggccagattaacccccagtatccggacaacagccgcgaactgggaatgataacggcatatatgtcgccgatcagccagtgggtttcgagtatctccccatactttggcaccagcatttactcatctcctggcgggttgatcgatgaaatcttatactatacccgg

SEQ ID NO: 77188 - DNA, 48 bp, synthetic construct
  source 1..48: mol_type = other DNA
atggtgtttattccacagttcgttccggcggcctttctgaacatgtat

SEQ ID NO: 77189 - DNA, 72 bp, synthetic construct
  source 1..72: mol_type = other DNA
atggactttgttactttgggtgggaacctgcttggcaccattccgctgggcgatatcgtgttatatctgacg

SEQ ID NO: 77190 - DNA, 54 bp, synthetic construct
  source 1..54: mol_type = other DNA
gccagcacgggcaccctgtccttagcggtgctgtcgcagatgccagttagtccg

SEQ ID NO: 77191 - DNA, 66 bp, synthetic construct
  source 1..66: mol_type = other DNA
gttaccggtagtatgaacatcggggaaattattacgtatcagagcgtgaatggcccgctggtcttt

SEQ ID NO: 77192 - DNA, 42 bp, synthetic construct; identical to SEQ ID NO: 76661
  source 1..42: mol_type = other DNA

SEQ ID NO: 77193 - DNA, 57 bp, synthetic construct
  source 1..57: mol_type = other DNA
ttaccgagtccagcgtactatacgggcgattccagcctggccttcgtgtttacccag

SEQ ID NO: 77194 - DNA, 252 bp, synthetic construct
  source 1..252: mol_type = other DNA
gccagcgacgtgaactcgacagatttctctcaattgaacgacaccgttcttgattcaagctttaacgataatttaagtacggtggaaacttccaacaactcgaaaaccgtcaataataccaataatggtgacatggttcagattattaaaaccaatccgaaaatcacggtaaaatcaacttatctgaaaagtaaagataaactggagtttaatttcaagaacgcgtccggcaacccactgaaatctaagagc

SEQ ID NO: 77195 - DNA, 48 bp, synthetic construct
  source 1..48: mol_type = other DNA
atggtttttattggcaataagaaatatagtgtgtacaccaacagcaaa

SEQ ID NO: 77196 - DNA, 48 bp, synthetic construct
  source 1..48: mol_type = other DNA
aacaaaattatgtatctgcgcatcagcaaattaagtacccgtattacg

SEQ ID NO: 77197 - DNA, 99 bp, synthetic construct
  source 1..99: mol_type = other DNA
aaaaaactgattgtgaagtacaaagggaagacggttaccaaaacttcaaacaaaaatggccgcattagctataaaatcaaatccagtggttcgaaacat

SEQ ID NO: 77198 - DNA, 78 bp, synthetic construct
  source 1..78: mol_type = other DNA
tcttcaatttcgaaaaagaccatcgttatcaaagtggcgagcaaaaaatttagcaagaaatccagtagtgaaggcatt

SEQ ID NO: 77199 - DNA, 159 bp, synthetic construct
  source 1..159: mol_type = other DNA
gaagtccgcaagacgcaatcgaccaactattactgcggtccaaatagtgccagcgtgtgtactcaggttctgaaaaattattactgtgaaaaatatctggcgaaattaatgggcacaaaccgtcgggaggggaccaaatgccagtggattatcgatggc

SEQ ID NO: 77200 - DNA, 42 bp, synthetic construct
  source 1..42: mol_type = other DNA
tttgataatgcgttaaacgaactgaaaaaaggcggtgccgca

SEQ ID NO: 77201 - DNA, 33 bp, synthetic construct
  source 1..33: mol_type = other DNA
aacaccacggccggcgcggatgtgctgagcatt

SEQ ID NO: 77202 - DNA, 33 bp, synthetic construct
  source 1..33: mol_type = other DNA
agcgaaattggcttagatctggcggttgtgccg

SEQ ID NO: 77203 - DNA, 87 bp, synthetic construct
  source 1..87: mol_type = other DNA
ggcatggtcgattttacgcaggccctgaccgcgaatgtggttgaaattccaaaattctacctgccgtttatgaattataacttaaac

SEQ ID NO: 77204 - DNA, 48 bp, synthetic construct
  source 1..48: mol_type = other DNA
gcgaccttatccgttgtgtatggcaacctgagcctggccatgagtggt

SEQ ID NO: 77205 - DNA, 45 bp, synthetic construct
  source 1..45: mol_type = other DNA
tcctacattctgacgggtagttattactatagcggcgcgccgacc

SEQ ID NO: 77206 - DNA, 36 bp, synthetic construct
  source 1..36: mol_type = other DNA
accggcgattattactatccaaacagcccgcaggac

SEQ ID NO: 77207 - DNA, 36 bp, synthetic construct; identical to SEQ ID NO: 76676
  source 1..36: mol_type = other DNA

SEQ ID NO: 77208 - DNA, 33 bp, synthetic construct; identical to SEQ ID NO: 76677
  source 1..33: mol_type = other DNA

SEQ ID NO: 77209 - DNA, 1701 bp, synthetic construct
  source 1..1701: mol_type = other DNA
gtggatgccgataatgcgacgttggccgaggatgcaatcccgacggatgcggacgtggtgcagactaaagtgaacaatgcaaactcaggagataccatcacattggaggacaagacatatgactttgcgaatcagaccgtcacaattgatggtcgggacaaaatcaccattcgcgggactggcaacactattattaaagggcatggtggccaaaattcaaaaacaggggccttgtttatcgtctcggaaagcatcggggtcacgtttaaggatattaccttcatcgacaccaacccgaacaataatttcacctatgatggtaatgtggaaggatacggtattacttttgacggctcaggtgcggaaaatggtgttgtagataattgcagttttgccgattttaatacggcagtgaacgtgaaatcttgtaactatgtaacggtgaaaaacagcaagttcagcggtggctatgctaccaaacttattaatgatcccaccgtcaacaaggaaaagggcagcaaagttgtcagtgccggtggatctttattcctcagcgttctcaattgtacttttgacggcccgatgctcgatgccgtatccatctatgggggtagtggagacgctaaaataattggcaatacgtttaaagataacgtatatgcgattttctttggcggtgcaagcacagagggcactttcatcaatgacaatacgttcatcgaatgcggccaatttgtgaaggatgcaaacacgacctggggaggctacccggtaatcagtatagaaaaagcctcggatagtgtttacatgaacaataacacgttctatgcagttaataacaacaaactgatcgcagcggaatctgccaatacggcccatggcgcgccaagcacgttaggcgatattaacatcaccaactctaatgtaaatctggcgaacgataatgtggttgccggctccgtcaccttccttcacattttaagccgcaccggcgacatcaatccgaaagcgcctattaccctgactggaaataaatatgcgaaaggggttaaagcggttgtggtctggtacaacgactggggggttgaagactcagaaaacattgtgatcccacaggctcctgagccgacgccggcgcccgtggcggtttcaacgtcgatttcgagcgcgaacctggcgatttacgctggtaactccggtaagatcaagctaactctgaaagatgcaaacggcgtggctgttgcgaacaaaacggtcaatattgtaattgatggcgtggctaaaaccgtcaccaccgatgataacggcattgcaatcctgtctgtgaaatattccaactcgggcacacactatgccaccctggcgttcactggggataacgattacactgggtcgataaaaacagtaaaaattagcgtgcttaaaaaagtcaccgccctgaccattaccaaaaaaacatttaaggtgaaaacgaaaaacaaaaaggtcactaccgttctgaaatccggtaaaacagtgctgaaatacaaaaaggttacgctgaaagtgaaaggtaaaacgtacaccgcaaaaaccaattccaaaggtattgctacctttaacatcaagatagccaaaaaaggtacctttaaagcactgaccaaatttgctggcgacggtgcgtacaaagccgcaagcaagtatagttatgtttatgtacgt

SEQ ID NO: 77210 - DNA, 57 bp, synthetic construct
  source 1..57: mol_type = other DNA
gatagtaccaaatcgttaaactatacgagctttaaagcgttcctgattctgactccg

SEQ ID NO: 77211 - DNA, 60 bp, synthetic construct
  source 1..60: mol_type = other DNA
atgattatccagggcactgagacgctgacctcgattatccatatttttagtgaaagctta

SEQ ID NO: 77212 - DNA, 51 bp, synthetic construct
  source 1..51: mol_type = other DNA
ccgggtttagcagcgctggggacgggcgatattgccaccctggctcagagc

SEQ ID NO: 77213 - DNA, 177 bp, synthetic construct
  source 1..177: mol_type = other DNA
gccttatcggttaatccggatatgattacggagcaaacccagaccaaggaagtgtcaaccgcaaacacatttacgcagaactatactgatgcgggtggcctggaagattctggatatagtgaagtgggtaaagtctacgaggacccaagcactggcaaactggttatggtatccggg

SEQ ID NO: 77214 - DNA, 306 bp, synthetic construct
  source 1..306: mol_type = other DNA
tttcagtttaacaataatgtttcaacattcatgattgtgaacgaaacgcatgtaacggaaaacagttcgtttagcgggatgctggtcgattcttacggcaacggcgtcgcgaatcaaaccatcgcctaccacgagccgggagggaacgtgggtaccttgactactgatgaaaatggtgagtttacggtagaattagctaagtacctgtccaacagcaccagtgacaattattatggtgatttcaaattcagcggcaatggcaaatatcagggctgcgcatatgaaggtaacgttaccgtgggaatt

SEQ ID NO: 77215 - DNA, 42 bp, synthetic construct; identical to SEQ ID NO: 76684
  source 1..42: mol_type = other DNA

SEQ ID NO: 77216 - DNA, 69 bp, synthetic construct
  source 1..69: mol_type = other DNA
accgccttaagcggtgcgattcaaagtgacatctccaacccgattcaggatctgatcaattcgacgggc

SEQ ID NO: 77217 - DNA, 45 bp, synthetic construct; identical to SEQ ID NO: 76686
  source 1..45: mol_type = other DNA

SEQ ID NO: 77218 - DNA, 90 bp, synthetic construct
  source 1..90: mol_type = other DNA
ctggcgctgtttagctcctatattctgccaggcccgcttgatgtggttaacagtgccttagtcgtaatcgaaaatggtaaactcttgacc

SEQ ID NO: 77219 - DNA, 60 bp, synthetic construct
  source 1..60: mol_type = other DNA
ggcagctccagtggtttagggtatatgatcctgattgcgacgaacctgtttgataccggc

SEQ ID NO: 77220 - DNA, 2904 bp, synthetic construct
  source 1..2904: mol_type = other DNA
gatacagatctgaatgccaatacattagagaaaagtaacgatgtgactatactgaatgaaggcgatagcaatgtgagtcagatacattcacaacataccgttaaagttggcagcgacagcgattccatccaaaatacaattgattgcatgaacgatggggacatccttaattttgaaaccggaacgtacaaggatatctgcatttatgtaaacaaaagcattacaatcaatggtaatggggcggaactcatcggctatgacactccttcgaaaagcaacacgccggaaattatctacaacgataccggtaagggcgggtatgccatcggaaattttgcgactttgtacattgttaaggcggacaacgttgtaattaatggtttgaagatcaccggcggtgcaaacagcacctccacttattctaacgccctgatatatgcaatgaactccaaaaacctgaccttcaagagcaatgttctggagggatcttcgtggggcctctacttccaatactgcacggacgggcatgtcaccaacaacatcatcaagaaccaggcagtgactggatttctgaactttgggtctgcacgcacctcaattgaaaacaacaaagtgatcaatgcgaaaaaccacggcatcgatgtaagacatggtaccggaccaaacgtgaaaattatcaataacaccgtcatcggttcaaaagaaggcatctatctgatgcactcgacagggcatgttgcggctaacaacactctgatcaactgcacgattagttcaattagctgttacggttctaaaaatattaaattaaacggcaacaaaatgcagaaatcgcgtatcggcgttttactcgggggcggctacgagaacatcaccgtgggtgaaaacatgtttactctcgataacttaccgtatcctccgacatttgcatattatattgcagaagcaaaatctgaataccagaatgatgaggacatcatgggtacgtttagtgacagttctttatatacgcctaacttcgtagcatttactggcattgacgtcccaaaagacattggcattaactatgatcccattctggaaaaaacaggcccggaatggatcgtgccagagggcgcttcaagctctgagattcaaaatatgattaacaatatgaacaatggcgatacgctaagtttcactcagaacgctatttacaatgaaatttcaatctacaccgacaaaaacattaaaatcctgggtaacaatgccactctggtcgggtgcagtggcattaactttaacaatacccactacttggataatgtcgcggaaaaagttcgcaaatcaacgaatgagggtggctatgccataggatacaatgcggtactttacatattgaataccaccaatgttgttgtgagtgacttgaacattaaagcgcaatacccgaaatatgactcgagcaaggttgaaacaacgacgaacgagtataagaccgtggggatttatgccgattccaattcagggctggtgattactggttgtgatgtcaccggtgcgagctggggtattttccagcagtattgtaaaaatagcaccattatccgtaataatattcatgacatttacactacaggcattatgaactttggttcaccgaatggcattattgccgggaataccgtgactgatgcggccaaccatggtatcgatgtgcggcatggtaccggaccgaacgtgaccatctttaataacacaatttcaggtgcgaaagaaggcatctacctgatgcactcgaaaggccactctgcctacaacaacacgatcctaaattgtaaaatcagcgggattaccgcctacggctctggcaatgaagtgctttttaacaataccatttcgggcagtcgtctgggtattttgcttggaggcggctattacaatatcaccattggtaaaaataccttcaagctggattccctcccgtttccgcccacgttcgtaacgtatcttgcgcgcgcggataataagtatcagtcggaagatgatgtcattcgtacgtactccgataaagaaacggcggccgttgatgctaacgacataacggtcggctataaaaagggtgagtttaacattacgctgattggccagaatggtgataagctgagctatgaagacctgtccatatctattaatggtgctaatttcaccgcgaaaaccgatgaaaagggcattgcggtgattccgctgtccttaaccaccgggatttataatatgaccatcaaattcgccggtaatgacaactatgcacccatcaacgtgacgaaaaccgtgaccgttaatgatgaccgcattaaaaccattctgtcggctacgagtaaaaccctttatctgaccatcatctcgaaaggatatagctacaaagtcacattcaaagacatgaatggaaaggcaattgcaaacaagaaaatcagtttcaaaattgatggtaaaacctatagcgccacgacgtctagcacgggaatagcgaatattaagatcaaagctacaacgactggcaacaaaaaagccacaatcagctttaagggtgatgataaatatgctccagtcactaaaactctgacggtaaaagttatcaaacagtcctccaaaatcagcgcgtataaaaagacttttaaagtaaaaataaagacgaaaaaatacaccattacgttaaaaaacaacaaaggtaaagccatctacaaaggcactgtgtatatcaaagtgaaaggcaagacctataaagcggtgaccaattcgaaaggtaaagctacatttaagattaccaagctgacgaaaaaaggtaaattcacggcaaccatcaaatattacgggaacaaatattacagctccaccagtaaacaggtcctgatacgcacacgtcga

SEQ ID NO: 77221 - DNA, 1629 bp, synthetic construct
  source 1..1629: mol_type = other DNA
gccaatgacaatccaaacaactctgacgatatctccaactatcaaatcagttcggacctgtcaaatactgaaattcaaaccatgctcgacaatgccaaagaaggtgatcaattcgaatttacggaccgcgaatataagaatattagcctggtggtagataaaaagttgaacattgtctcgaaaaagaatagtaacattcacacgagcaacaaaatcgctgataaagcacgcaatttgggcctgaacaatagcttcggattttacttcacctctaacagtggtggcagttttttatatggcctgacaattatcagcaatagtgattacggtatcgttgtcgataagtctgataacacgaccattaaaaacgtggtgataaaaaacgggaatgtcggtatcttggttaaaaactccaacaatgcggatatcattcagaataatattagcaaagccaattccaacagtattcaccttgagaacgtctctaaatcaataatttcaaaaaatacaatttcgtataacgggcgttcgggcatccatgcgagcaatatctactattgtaacgtaactaacaacaccgttcatcacaataaattcaatggcatctccctgtacaataaaacaactggaaacatcatcaaattcaatctcgcgtacgaaaaccctaatggaatctacattaattcccagtcagattttgatgtggttaactcgaacaccttcactaaaaatcgccgtaacactgattatgaactgggtgctttcgaaagcggtaacggcctgctatttggcgcggattttaagacggccaaagagggcaagtctagccgactggaagttaaatataacgttttaactcataacgagggataccaggctaaaaacaatccggaccttcccacctttaagctcggggataactggttcgactccaccgatgatgagaatacgtttgtgtgcccgatgctgctggcaggcattatgaaaatgggcacgatctcggtgaaaaacggttttggtcttcagatgtatgataccaatggtgaggcagtcacagaatttggtacctttgacaccacagtgaacgtgaatggcaaccagtataccgcaaaatttgtcaacggcaaagcaattattgacgccaacctggacccggataaagagtatgaaatcgaggtaattatcggggacaaaccagtgaaatttacctatcggacctcctcgggtgataagaatgatgaaagcgattcccagacctcaacagatggcgacttcggcataaatcaccatgacttcattgacgcgatgggcaatgatgcgagcaaaggtgtagggaactcagaaaacggcacgagcagtgcgcattttgccaattcagaacaatcgggcgcacatggcacgaacgcgtcgggtaattttcaggactcatctgataatggtgatagcgtgttaacgaacgggaacgcgaatgctggagattccagtaaaggtgaacagtctgaagaaggcaaagcctacgaaatagttccgcagagcaagattagcaaagagatcacggataccagcggtattattgtactgagtatcgtgtctattctgggaatgattatttatgggtactggcgtaaa

SEQ ID NO: 77222 - DNA, 93 bp, synthetic construct
  source 1..93: mol_type = other DNA
caggacattatttataaagaaatcagtccgattttcgaaaaaatggttcgcgagtttgtgaacgatccaaacagcaatctgggctttgaaatc

SEQ ID NO: 77223 - DNA, 42 bp, synthetic construct
  source 1..42: mol_type = other DNA
ggtgcgtacatgagcgccgatccggtgtataacggcattatg

SEQ ID NO: 77224 - DNA, 450 bp, synthetic construct
  source 1..450: mol_type = other DNA
tttattgatagtagcatggatagcattaaccggaccatgccgggggttagtgattcgattgtgaacggcgacaaagagtataatgaagcagtgcaattagtcaatgataaaagcttcgatgaagcaaagactaaggccgtgtctgccgagaacaactataacaacagcctgattaagctgaatggtatacgcaataacttttcgtccgatattaacgaagttcaagaagaatatattggcaccgttattaaagaattggaactgaaaatcaacgcggtcaataatctcaaagaagctatcgactgcttcaaaatcaactctaattacacaggtacgaattacgcttccaaagcgaacgaccttatgtatgaggcgacggagtaccagcatgaacgtaattcaatcgtaaaaaataactcaaatctgttcaaacagcagaactttgtgatc

SEQ ID NO: 77225 - DNA, 438 bp, synthetic construct
  source 1..438: mol_type = other DNA
ctgaacaataattttaatagtcacgatagtgagattccaaacaatacagtttctagccaggaaagcaacagtgcaaatatccaagattccgacaacggcggggatgtcaaaactcaggtgacctcctcgcagaccacgaactctaaatcatgggagccgatcggcagttatagcggttcaggttcaggtagcaagaccattacggtaccggaaggcaaaataaaagtggaattttcggcctatcctattaaaaattatgctaccaactacttaacagtctccggatcgaacggcgagtcggggggcgtagactggggttctcatagcgcggttaagaccaaaagcgattcatttatctatacttccagcagctctgaaacgttcacgattgactactacgaaaccgtgagttgggaagtgcatttctaccgctatcaa

SEQ ID NO: 77226 - DNA, 207 bp, synthetic construct; identical to SEQ ID NO: 76695
  source 1..207: mol_type = other DNA

SEQ ID NO: 77227 - DNA, 96 bp, synthetic construct
  source 1..96: mol_type = other DNA
tttgcgtttggttccgatatcaatgggctgattggtagcccgaccaacttcttcttacagggcatcggcattgatgacctgagtggatcgattcca

SEQ ID NO: 77228 - DNA, 42 bp, synthetic construct
  source 1..42: mol_type = other DNA
tggggcggcgggtggctgatgcagatgggtgcgttagatttt

SEQ ID NO: 77229 - DNA, 54 bp, synthetic construct
  source 1..54: mol_type = other DNA
tttgccgtgccggcggttaatgaagctgccggtctgattgcgggcaacgcaaac

SEQ ID NO: 77230 - DNA, 534 bp, synthetic construct
  source 1..534: mol_type = other DNA
ctgtttaataatactgtaaacatctatctggatggggaaaatgttagtgttgaaacccagacgttcgaagacatcgactcgaacagtttgaacaaagatatctgcagctacaccctgaatgtgatgaataataccacgtccgatgtggaaacgctgaaaaacggtgtagagaagttgtgttatcaacacggtcttgaagatgccgagataaacattgattcaagcctcggacatgatcagatcccaattatcgtccatgttgacgggacctccatgttaccgaccctgcaaaacggccagacagtgctggtaaataaaactcatgactttgaagtcggcgatattgtggttgcagaatctaaggaatacggtggcattattaaacgcgttgacaaaattgacgagaacaaagtgcacttaataagcgacaacaaaaatatctcgtatgagtatattgatggcgcgctataccagatcaaaggcatcacgacatgggtcgatatttctgatgtcaacggtgtggtgattgattat

SEQ ID NO: 77231 - DNA, 3864 bp, synthetic construct
  source 1..3864: mol_type = other DNA
agcgatgtcaacgttaccgactcttacacaaccagtgtagcggacggcgcctccaatgtctcagttccgattgaaaattctgatgacagctcagtcctgtcgctatcaagcgaatccgatgtgggcaacgtaagctcgaagaacagtgaatctgtcaaaagcaatactctctcaaccaactcggacaccaactctttaagcaatcgcggaaacgatgtgttagaagtgaacaataccgcgtctcccaccattaacgcatcggaaaccattgcttcaaaagatattaccaagtactataaaggaagcacagggtacaccgctaaatttctggatatgcatggcaatcccctgaacgggagcgatgtgaaaattactgttaacggtgtgacgtatactaaaaaaaccaatagtgtcggcgttgcgtctctggcgatcaacctgaaacccggcacgtacaaaatagtttcagaaaatctcattacaggttataaactgaccaacaccattaaggtattgtcaaccatcaatgcaaatgacgttactaaagtgtatactgacggaaagaagttttatgcaacctttttgaaaagcaatggtaaagcgctggcgaacgcctatatcaagtttaagattaatggcaaaacatactctaagaaaaccaatagcaagggtgtggcgagcctatccatgaccaaccttaaaaaaggtacctacaaaatggtctcgtataacaaggatggtctaaccaaaacgaacacggttaaagtggtgtctaagacgagttcaaagcttaacaccaatgcctatacgttccttaaaagcgatagtaaaaatattaaagttactctgctgaacggcctgggatatgccccaggttcaggcaaaataatcaagttcaccgtcaacggcaaaacgtattcggcgaaaaccaacagtaaaggtgtagcttcactgaaattaccgtatctgaaagccggtacttatacagtaaaatacaagttttctggcaacacattttatacggcatctagtgcctcgaacaaactgtacatcctgccaagtaaaacggcgactttcactgtgaaaagcacgacaacgtttgggaaaggggctaatacgcctttcaaggtggctctgacgtccggcagcgtgccgctggtcaaaaaaacgatcacgctcaccgtcaatggcaagtcctacgataaaacaacggatagtaatggaatcgtttcaatacctattgacctgcaaaatggcaaatatacagtgacctataaattcaatggtgactcgaaggtcaatgcgaaaaccggctcgtctagcattatcgttaaggaacgcacgtccacgaaagttacctggaaaagtggaacctctttctatcagggtgctcagtcttataaagttctgttgcaggattcgaatggtaaggcgctggcaagtaaagttgtgaaactgactgtcaacggtaagacgtattcagccaccacttcctcaaacggatatgctacctttaatgtgaacctggcgccgggcaactacagcattagcctcaaatacccgggcgataattcgtacgctccgagcaacggcaatgtaaaagtcagtgttgagaaaaaagaaaatacaggctatgggtattgggtgtacggtgaagacatgagcaatgttgacctgaaaagcttagcgtccaaaggcactagcgacctgttcctcaactttaaagcaattgagcttcatggccaatcgaaagttgaaagctggattgcgagcgcgaataagctgggcatgcgagtgcacatttggatgcaaatcttctatgaaggtggcaaatgggtcaatccggtgaagaatggcaaaccatatgaggcattttttgagaaaaaaatcacggaggctcagggatacgccaaaatcaaaggtgtggccgggatacactttgactatctcagatatagcggtaacggggagagtgccgcgcataaaacccctggcggcgcggcagccataagtcaattcgttgaggatgcgaccgaagcgattcataacattgattctaacattatcgttagcgcggcattgatgccggaaactaccagcattctgaaatactatggccaggattactcggtaattagcaaatacctggatgtcgttattccaatgatttacaaaggcaattatggtaaaacgtcagcgtggattaccacaactacaaaatggtttgtagataactcgaacggtgcgcaagtgtgggccggcctccagggctataaatctgatagtaatgttactaaattgtctgcttccaccatcaaaaccgatgcccaggcggcactggatgggaaagcgccgggcgtcattatatttcgttggggtgtcaccaactttgtcgatttcagttccttatctgacaaatccacatcccctagtaccaccggctcagtaacgattgcagatataatcgcagcagcaaataatttgaaaaatgttattaatagcaagaacacaatcccggcaaccgtgagcgttggtgggagcagttattccactgctcagttcttatacatgatgaccgaagcggtgaagaagatcaatgggggtaagacttcctcacaaatcttgcctatctcggtgggagttccgacaaatccatctggtagctttaaatccgggaacatcgcctccagcgaatatgtgaatatggccatcagtattaacagtttcattatggaaaatggtcgtgcgccgaacttcgctagctcatcgtcactgggcacgattgattacgattcgttagtggagatgtttgcggatattctgaccgactataaagataacaataaactgccgacttctgtaaaagtggacaacgggaccaaatccgaagtcatcaccgccaaaaccatctccatcaaggatatcgtgacgggtgcgaccaatctgaaaaaatattacaatgattataagaagttgccgtccacggtgacggcagggaaaattaccttcaaactgtcggaatttgtttacttgatgagcaaggcgattaaccagatcggcaaatctaatacaaaggcaattacgatcatcacgggtatcggtaatccaaccaacccgtctggcgataacattaacagcaaatacctttccaaatcagagtaccttaaagtggccctgaatgtgaccaattatatcaacaaaaacaaagtagcgccgaattacgtttcctccagtcttggtaaaatcatctactcggaatatgtcgacgcctttagccgtatcctggccttttatggtaacgaaaaccgtttacccaatacagtaactattagttatagctcaggcagcggatcaaactctggcacgggtgccactggcacgggcttaaatgaagcccttaaaaacgggaccgagctgagccagtacctgaaagctaccaaaaattgccaggtagacaactcgaagattaaagatattgtgaacaaagtgaccaaaggcttaacgtcggtgaaagataaagctactgcaatttataactatgtacgcgacaacctggattatagtttctattacaacaccaaatacggggcggtaggtgccctgaacgctaaaaaaggaaattgtgtcgaccatagccacttgttagtcgccatgttccgcacggcggatattcatgcccggtacgtgcacggtaaatgcacattttccagtggaagtacgtacggtcacgtatgggtgcaggtgctggttgataagaaatggacagtggcagacgcaaccagctcacgcaactcgcttggcaaagtggccaactggaacacgaacaaatttagctttaataattactattcggaactcgggttc

SEQ ID NO: 77232 - DNA, 1911 bp, synthetic construct
  source 1..1911: mol_type = other DNA
tccaataccgttgacacaaacttaactcatgatgccagtagtgacgctaacatcggcattaatgatatcgaatcttattcttcgggggtgttctctgacgatgtgaaatcaaccggcaatgtcatcgtgaaccagagaaattataagatgtatttcgatgatagcaacgtgctgaaaaaggagtacggcggcaaaatcatcgcgttttctgggaagttcaccgataaaggtgttatcactatcgattccgaaaataccaaaattaccggtcgcaataccctgtttaacaacacggtgttcaacatcaaatctaatggtgtgatgctgactaatctgaatttcgtgttaaacaaggaatttagcgataacgaaggtgcttgcgtactgatcaatggtgacaatgtcactgtctataatgttgatatcgactacaacgtgcccaaaaacgttaccggcttcggcatctattcgaatggtctcgatgagagtctgagcgatgtgaaactggtcaacaatacggtgcggcttcatggcaatgcgctgaatgacgggtataactatggggtggtattgactaacacgcgtgacgcgattgtctatggtaatattattgactgtcagcttccactgcgcgcggttaattggatggcggaaatatatggtggtataagtatggatgcagtatccgggctggctgcgggcagctgcaatggcttacggctttccaacaactacatccgttgtgtggtcaatggggtcgctcagggcgaaccaacacttgatgccgtactgatttacgcatgccacaactcgaccatcgagaacaacacaatcattgaaaacgattatgttaccaaaaagggggatgttaactatttgtatggtctagatctgtatctgtctaatgatgttgtaatctatggcaatgacattcatattcgcaccagcggcggtaaagaggctcacggtacggcctatccgattcaagtaacgggacaggcagaaaatatcctgattgcctttaacaacttgagcagctacagcaacggaccgaatatcggtatttacagccagaactactacggagtaacgcatctggatattatcagcaattttattaatgttacaggtcacgcaagcaaacacagttgggcgttggtcgccggcattgaagtgcaggattccgatgaccgcataatgaacaacaccattattgtcgacacggtgaacaaatttgaaaaaggatacaacgtgtacggcatcagctatagccaacgaaccgatggagatcacaactataatattcagtataataacgtctcaaccaactccgaccatgcggttgccctgaaaggcagtggcagttccactgtcagtaactccattgtggccaataatattttaaagggccgcaaatatggtggcaaccgtgcagcatacattacgggagggaccggtaacgttattatcaataatacggatgggtcgcgtcctgttcataaaatgacggacgatgagtactccgacaacctaaaattttacctgtcaagtccgtttaaaggcaacggtctgggcttggggtggcttgacggtgatggcaactccataatcggcaacggcgaccgcaacggcaactcattaaataatggaaatagcgggctcgtgaacaacaaggtttacggtaataacctcaattatagcgaatcgcaagcacgtaatggtgttctcaattcaacatattacacatacggttcttcaggcaccgatatagccagtgcgtcgtcatcgtctggtagcggcgcgggaagctcaaactcggagtcatctgatgtgaaatcgtatgaagtaaccaaaaaaattaatgataacctgattcatattccgattgtgattatggcggtgatcgccctg

SEQ ID NO: 77233 - DNA, 3225 bp, synthetic construct
  source 1..3225: mol_type = other DNA
accgaagatgtcaatgacacagcaattgctgattcagaaatcgatgaagtcagtgctgtagacattgaacagtcggtggacgacaatgagatcacagagattcaaagcagtgatgaatccaataaggtgcttgcacgtggcacaccgaccacggcgaaggattggaacacattacgcaccaaatgtgaaaaaaccaccgatcagtatatcacactgacgggtaccagctatcccatcggcacctatatcacgtttaaaaacagtgcgaccattgttggtagcgacgttagttacattacgggcggttctacctcaaatactccttttgtaaacaataactcggccctgacactacattttattaatgtgaagtttctgaacgttaatgcgaagaatttgctggagcttgatggtaccgtgtatctggataattgtacttttgataacgtgcagactgccaccggacacaactcggtaatctataataccaataatttgatgtatttgacgggctgcaacattacgaactgtcacacgggttatggtgcggttagcaattataactcgggcagtacaacaagtccggtgatgtatgtggacgactgccgatttattaataatagcgcgagtgtcgaaccgggtgcgattaataactgcggaattttgtatgtcaataactctgaatttgacggtaaccatgcaaactggtgggcgggcgcaatccatacccacaccaacgcgcagaccgaaattgaaaacaccaactttcgcagaaacacggctggctggaacgggggtgcattattcacctacagcaaactgaaaatcaagaattgtacttttgaagacaacaactgtaccactaacaatgggggtggagccatcggcgcatacaactacggcagcggatacaacatcaccatagacagctctcggtttaactacaatacaaacctgtgctacgcctacaccaatatcagcaccacttcagttggtcgtggaggcgcaatctctgtacttaatggagggtatctgacggtgtataactcaaatttcaccggcaactacgccaaaataggtcaggcaattgccgcggcaacctataactacgaaaatggcacgggtggcaacccccacatcaaaatatgcaacaataaattcacggaccacacggcaacgggcattgacactgtagtgattacgggcaacgactatatcttcaacaacaatgtcttcataaatagttatcagaacaccatttatacaggcactggaaacacgtacaattcggccgcgttgccgggtaacctgaacagtaaattgaatctgaaaacaaaactccgcgccactaatactgaaatcctgtcggattaccaggatcatgatgtggtgtacgtgaatgtgtcttccgataaagatgcagaagatgacaacgtgcatgggcaaagctgggatgatgcgtatggtggtctggagtgttttgtcatggcaataaattatcttcataataatgggatcatttatattgcagacgggcgttacaacgaggactatggctatgagtactccatcgcgcacggcaactttacgatgatcggtcagggcccaaaaacgaatatcgagaagatcatcacaacggtatatggagggagtgatcaaaattctacgcataattttatcaatctgtctttcactgggaaagattttggtataaacgcgaacttcattaattgtacctttctggggagcatttcaatttcaaaaggcctcacgtatcatgatccgaatcatgttgtggaatatggttatgctcaaacttatttcatgaactttaacaactgcgttttcaaggatgtcaatactaccaatgccctggttacgctgtataagtatggggctgtgaactttaccaactgcatctttgaaaatattactgcggattcaattgtgtaccgtaatgatatcaattattttgaggaggacggaatttcatttaaaaactgcactttcactaactgcaaatataacggtatcgctgattccctggcgaattttgatgacgcggttgttattgaggattgtacttatgatagcgaagttgctctgggcaccacggaagtgaatgggcattactatatcaatgcgacgaaacttaaagtgacggctgtgggcacaagcatttccattaagagcaatgaaaataacgtaattgtgaacttaaccgatgttaacggtaacccggttgcgaatgccggtatcatttattcgattgccggaaccaatgccagtgccacgactggcgcggacggtaccttcactctgtccaacctgaaagggattgtcaacatcaccgtttactattccggcaacgaatcgtatctggcgtctaataaatctgataatttcatatttaaatacaatacggccgtttccagcgcggtgaatggtgatgatattctaatcattttaaaagatgatgagaacaatccaattgcaaacgcgaacgtaatttataccgtcaacggcattgactacaatgcaaccaccgatgaaaatggcaccgtaacggtctccaatctcaaaggtaaattcgccttcaacgtcttatataaaggggacaccctccacaccgcttccaatgcgagcaacacattcatcttcaaatacgggaccaaaattaccgcaaaaaaagtaacggccacgtacaatgtggcgaaaaacctggttatcaccctgaaagatgaaaacggcattgctattgccggtaaaaaagtaaccgttaaagtcggctcgatccgcaagactctgacgacgaatgcgaaaggccaggcgactctgaaagtcagcaatcttttgcctaaaacatactcggccaccgtcacgtatgccggtgatgatacacacattaaatcctcagttaaagtgaaggttgtggtgaaaaaagcaacactgaaagtatcggctaaggctaaaaagttcaaaaaatcactcaaaaccaagaaatactctattgtgctgaagaacaacgtgggcaaggtcctgaaaaagaccaaagttaccttaaagatcaaaggcaaaaccttcaaagcctacaccaacagcaaaggcatcgccacatttaaaattaccaagttaacgaaaaaaggtaaatacaacgcttacattaagtttgcgggcagcaaatactacaacagcctcaacaaaaaagtcaaaataaccttaaaa

SEQ ID NO: 77234 - DNA, 1041 bp, synthetic construct
  source 1..1041: mol_type = other DNA
tcgacggtgaactacccccggagccataaaaccattgaaatcacccaggataactacgaaaactactttaatatccgcacaggcaagatcattgatgcctcctgtatttctaagggcgatactctgaaaattggcaacatttcaaatcgcgcttttgtgatagaccgtcaactgatattaatgccaatctcttcgaacgataagattagtaacgggttcatccacctgattaaaggaagcgacggctcgacggtaacgaaccttacgattaataataccaaagatcgcctgaatattctgggcggcaatgtcggtcagctacatggcatctggctctcaaattcgaataacaatcttattagctataacaccatccgtatcgcaaatgcggcgggcgtgtatgccatgccgatgggttggtcaagcaataaccgaatcatttacaacaatatgaaaacatacatcacctgtaatatggttatgggacagtgccattacaatttaatttcacacaacagcctggagttgttgagttattccgacacctccgtgaccaatttgatctattttaacccgtttgggcatgccgattacagtggttccggcttatgcaaatacaacatgatttcattcaatgattttaaagggttttctaacgggcctatgtccattctgctgcaaagtgtttatgaaaaccacgatggcactgttattgcaaataacactttctctaaaggcagctatgccatccacctgttcggcaacaacatctctgtctatggtaatgtagtactcaacagcggaattggtattagcgttttcggacgtaacttcagtgtgcataataacgctgtcattggtgacagtcagggttacggtattatggcagaagcgaacggtggttcgctgtgcaatgtgtataataacaatattacgtttatcgacgtttataacgcgatctttatcggcaatcatgtcaaagcgtataacaactatataaatatcaaagagtatggggtgagcatatttattaaaggtaac

SEQ ID NO: 77235 - DNA, 144 bp, synthetic construct
  source 1..144: mol_type = other DNA
aatattcacgacaatcggatcaataacaaacatgatgccggcataagcgtgctgggtaacaacaacacgatcaacaacaatattattaataccaaaaatatcgggattaccttaccggcgcgcagtactaactgccgttactat

SEQ ID NO: 77236 - DNA, 1182 bp, synthetic construct
  source 1..1182: mol_type = other DNA
aatacatttaccaacaacaaaattaatagcgaaagttatgggatctatatcgacggtctggtgtataactgcatcatcttggacaacatcattgagacgaacagtacgatgggcatttttaaggacatcacggatgagttatccaatattgaagaaaataacatggttaacggcgtgattctggatagcacatatattattgtcaacaacactaactatcacaaatattttgacaaatacgggcacttaaccttcaaattcgaaaaaaacaaaactaaaatcatattcctgacattcctgaccaataagaacctcattttccaggaaaagatcaatgtaattagtaacaaaatgaacaacctgctcatcaatgttaccattacgtttgagaccaatgccagcggctcattaatccgtgattttaactttattaatcacgacaaagaagcgattattctgaatggtgttaacgatgtgaccgtcactcgcaacaatattaccaacctgtttcgcaacggcagtttatccaattcagctgtgttgattcaagatgtgtgcgaaaaccttataatatcctacaataatatatacgtaaacagccgcacccattgttatacgtatgcaatcaatgcgccaagcattaatccggcgacgcataaaatgaataacaaactgtctaagcgggtgaacatcctggataacaccataatcatgatctcttcaggtatcaccgaagccatttacactgatacgctatcggaatccaactttattagcaacaaaatcaacattatttctaaaaattacggctacggtatcgcagtttctaatatgattggccgtctgtcggatatcaatgtttcaaataatgagattgtgatccatagcgagcagatggcctatctgatcgaactgctccaggtggataatagcaccattgaaaataacaagctgtatggcaaaagtaatggagtctatgcgatcggtatctactggtcggataatattagcgttaataataacgccattagcgtctttgggggaaacctgtcgaaaattttggaaatttctgatgtattgggtatcggcaactccgcgatagcaatccttcgtaatagttcgaaaattattatttccgagaacattatttacgctaatctttcaaaaacaatcttcgacaac

SEQ ID NO: 77237 - DNA, 2775 bp, synthetic construct
  source 1..2775: mol_type = other DNA
acggacgggattatcaatgcaagctttaactcattcattattgataatgagaactacaactgctatttcaacgaggttggcgaattatactctaacgtggtaataaaaaacagtactctgctgattcataatcttaccaaaaatcagctgctgattatcaacgatctcgtgaaaatcagctcttatgaccttaactcaccctctagcatcagcatcatttttaaaaataatgcaagcaactcaatcatttccaatgcaagctttattaatagctcaattgatttaatcaatgtgtccaacattaacattatcaataacacgttcaactcttcaaatagttgtatcttaaatatcaatggtggcgaaaagaacctgtttgttaataatgagctattcatcaactcgaccgacattagcgtgatcaatctcaacaagactctgctgaatattatcaaaaataataatattaagttcaacacatcgaactcgaaaattataacgattaacaattcgaacttcaccctgattagtaataatgtcatcataggcatctccgattcactgatttttatttgttctaagggttcaagttacgataatatttacaaaaacatactgaatgctaatgcttcgtcaatatgcggctacttagcttctaatgccaaatggagtagtattagttataacaatatcttaatcaataaaagcaccaaccagagcgcgatatattattgtaataactcctctaacaatacaattaatgaaaactatatcattagctatagcctaaatgcgaatgactacgccgttagcgtcatttccaacgaaagtctgagcaatctgataattaaaaactacttaatcagtagcaacggattcaaacgcgctaactttgcagtctacgccccgtttgacttggttaaagataacagcccatttgacatttatgttagctgcaatggcagtgatgtggtcggcgatggtagtattgataacccgtatgcgactatcaaaaaagcgattgaaaatagtctgaatttgtacgtgatacatgtcttcgatggcaattatacggagtcgaacatcattatcgataagaacctgacgcttgtggccgttaatctgggtaaagtgttcattgatgttcaaatcaaccagctgtttgatatacttgaagataacacgttgagcatttcgggctttctgattggaaacgcgcataatgttgatggcggcagcgtcttcattaacaacggtaagttgttcatcaacaacgtcgtgatcttcaactcctccagctacttcgataactctcatcccatcttcgaccaaaacatcacgtatcacgaagataatctgatcgataaagcccacaccgtggattgttcgaacacaggtaaaggcggcgcaattctcaataacggtgaactgattattaactcctcgatcttctttaataactttgggcatcgtgggggtgtcatcgctgactatggcaaaactatcatcaattcctcgattttttataataaccgcggaatccacggaggctgcatttattcagacagcaaaaacaatttgtttgtaattaacagcatttttaataacaacaccgccgtaacgtcaatagacttttgcaaaatcatgctgcattccattggttggagcatcggagagaattatatttacaactacaaatcggaatgcgactccccgattggggcgggtggagtgatttacaccaaaaacacttccgtactgattaaaaactcctcttttatttataattctgcccgtattggtggggtaatcgccacacagtgcgacatttttacacaactctccaattttattagcgatgttaatctgtatatcgataattgttattttaatagtaacaaggccaatgatacccgatttaaagacgatccactttatctgaagaactacgattactttaacgattataacggcggcgtggtgtatggcacctacaacaaactctacatcaatgcatcgaacttttactataatcaggttattaataacggcggcgtgctgtatgcgaaagctaatgatggtaagattatcgacagcattttcaacaataatcgtgcaggcagtaacggtggtgcgttagacatttcaaaaaatttccttatcatgcggagcatcatttcaaataatagcgcgcgctatgggggagcgattgaatatgattcgtatacctattatgggcacatccaggacaacttcaacatttataactccaccatatcaaataataaagcgctgaatgcgggtggtgcatttaacatcgggtcgggcaatgtgtctgttcacgatagcaacattgtaaacaattttgcaccttcgggtacgaccatcaactctcatggaatcaaatacgccattgacatgagatacaactattggggtgtattgccaaacggtcatattggccctgatgactcagtgtggaacgtgaaccataacctgtttaaaccgtggtacaaacagtgggttgaatggaagcctaaagtcattgaatcaaataactctgggttcaactctaactcgagtaatcacaatccgtatatcaacccgaactccaactcgggtggcaataaccataataatccgatctctaccggctctagtagctccacgaccacttcaatcggcggagcgaacgggaataatcacggctacggtaacgggaaatactttggtagcggtgatggcaataacttgggtccgagtagtggcaacggg

SEQ ID NO: 77238 - DNA, 291 bp, synthetic construct
  source 1..291: mol_type = other DNA
gccatcccaggttacaataaatataacgggcagaacgtgaatagtaatacctcaagcaattcccataagtcgcaaaatcggggaaacgtagattccgatagcttaagcaaatcaaacagttccaaatataacccggacctggtgtctgcgggctttacggttaatgcggcttcctcgccgagtagctcgcagcgcggcatcgaacgtgccagcaaggagagcggttctctgagtgactcagcatcttacgaaattactaaaaaaattaaagaagtcttctatgatgagaac

SEQ ID NO: 77239 - DNA, 6501 bp, synthetic construct
  source 1..6501: mol_type = other DNA
gatactaacacgagcattgtcgaagaaccaatggacgttaaacacaatctgtgtgacattaacaatagcctggaaaatcaagaaatctatgtcagtccgctgggtgacgatgatgctaatggcagttttcagaacccggtttcctccatccaccatgcggtggccatggcaaaaaataattcgaaggtgattctgatggagggggagtataaaggggccaataatacctttattctgattaataaaaacctgaccattgaaagcttttccaacaatgtggtgattaatggcgagaacaaacatgccttctttaaaatcaccccctcgagctctctgatccttaataatattaaattcattaacggctatacagactcttactctcagctggggattatcaataatctgggcaccctggtgataaacaactctagctttaacaacatgaacagcattatggggacctttttcaatgaaggcactctgaaaattgaaaataccaaggtgacgaatgccgtcagcctgacaatggcgcagatactgacgaatatcgggaatacgacgatactcaattcccaactgattgaaaacaacgaatactcgtcaattgatgtggttgtgtataactataatcggattagtatcgttaacagccaagtgaataacctgtttagcaacaagaaatattctgaggattcatataatttagcgtcaattcttattaacaattctaagctggataacattgatctggaggatgcctttgtgtgcattcacaactcgcagatcacctttaagtcgattttcaacggttgtaatgttagtgtcgacgagagtacatttctttacaacaagagcctgttttcaatcattaacgtcatgaatagtaactttacagcgattcactccgttttcaattctcctatctcaacgaaacgttcgcatgttaacatcacctattcggccattctgcgctcaatctcgggcaacgcctataaatgctacctgtatgctccttacaattggtggggtattaactcaggtccatcgtatcagtactttacagatgtgaacgtgagttattgggcaatcagcactttcgaatatgaatctgactatattccgattaatcccaattccacgttcaccaccaccctgaataaatggagtgacgggaatagcaccttcgaatttaaaaccgaagaatatctgccgttccgccatttgaaatttgaaagccagaatggtaaattcctgtattcctcggcaaatatcgaaaaagttttcagcaattacctgattggaaacaatcttgattgtcaggttcatgtcatcatcgactttcagcggttgactcttcgtattggagaaggtctgaccaactataactatttcgtctcaaccgaagggcacgacggtttaggaaacggtaccttcgaacacccatttaagaccatcaactatgcggtttccaaagtaggcaatggcaacaccatttgtttactcgaagggatctacaaaggcaactggaacagtaacgttacaattacgaagaacataactattgttggcctgggaaacgtaaacctgctacgctctaatgattatagtatcttcaacatcaaagagtggggcagcttgtcgctgaaaaacattaatttctctgttgatatcattgactacgcacatccattaattatcttaaatggtgggaatctgtcgatcatcaactgctctttcagcaatatcacgtctaccaacgtgatccacacctcgaatgggatcgaacataacggaattgtgaacatctctgattcgtattttgccgacatttccggctcaatactgatagggagcgcgaaagtaagtgtcagcaacagcctgtttgaaaaaattaaatgctatcgcatcattcaaggctatgaatattataatgtcctcttcgcaatttcatcgtccatcgaaatttatagctcctgttttcaaaataatctgatgggtattgtaaacctgcatccctttttttactcatcaagcaagcttagatattcgcagtacagtaatgcatacagcagatatgcgtacattaaaaacactaaattcgagaataatgtatttttcgataagaatagttattacagcagtaacggcatcggattggacatttataatgaaaacgaacacttttatggcattatcgataactgttcattcattaacaacaaaggtcaactcgccatcgccaccagcgtcaattcatccatctttatgaataattttgaatcccgttatggttacagtatggtgtatgctgatctgattaacaactccgtgtttattaacaataagaatctgtatgaggattataataacgtattcatcggtaatggcatagcgagtgctggctgcattttggagtcgatttttatgtataacgaagcggcgttcggtggcgcgatcgcagataccaaagaagcccactattgcgtgttcgtaaacaacacgagcaaatacggtggtaacgacatctactcttatagcggcgatgtagactactctagcaattggtggggtgacaaccagaaacctaactcggacaaggtgtttattttccttggtacgttgactttgaataactgggtcataatgacatttgagagcgtgagcaactcgatcattaaggcgtccttaaatgcgctgaataatggggaaggtaatatttgcaaaattaaccacaacatgccttcgcgcatggtttacttcaaaattaaccatggcagcctgagcccggagaatactctgcttataaacaattctgcgtataccaacatgacttacaatctgaacctggatttcaaagtctatgcacgtattgataatcagctactggagctcgatattcgcaatacaaaaacgctcctgataatggaagatgtgatttttaaaggtaaaagtaacaatttcgcggtggatctcatcaatattaacggttacaaaatctttaaccagacactagtcgtggaaattattgatgagaacaatacacagaacatcttcacaattcagacggacgataacggtcacgcagaatttaatgtagattatccggtgggtatttatcaggtcaacattaactacctgggtaacggatattttgataaatgcaactctactagcatcatgaaaatcatcaagtcgaacacctatctcattagttacaaccaaacatattacggcaagaacaacttgtttaaaagcgtactgttcggtgaaggcaacaagaagctgagcaacatgactatcaaattcacgattatcgactcgaaaggtaatctgcgggagatctattctttaaccaaccaagacgccaccagcgaaattattatcaacttggatgtaggtgagtataccatacgctctgaatttttaggtgatctgtggtattcttatagcagcagtatttcgcatatcttggtcaatccggtgagttccaccctcattgtctctaacgttaccttatacggtgtgggtgatgtttacaatattaccttaaaagatatccatggcagcctgatccgtggcgaaaacattattgtcacaatcactcaaggagcaagctgtgacaaatttaccttaaaaacagataacaatggggtggcaaaactgacgatcaactacctgcctggagtttataatgttaaagctcagtttctgggcgatagtatctatgccccgacgagcggtgagggcgtgatcaaagtcgaaaagattttcacgataatttcagggttccatcattgtatcctgccactgaacgggatctacacagtcgtactgagtgatatgtacgggcgacgtgtcaacaacgaatcggtaaccttatccttatacaagggcaacctcattaagaagtacaccattaatactgatgctaacggcgaagctgactttgtgatcaaccttgaagaaggcacgtatctaaccacgtttgagtatggcggcaataaatggtattgcgatgccactaatgcggcaacgatcgtcattagtaaaaaagtgaatttatccaacattaacatcaactcaaccgacttggtgcagtattatggggagaacaaatacttcataatcaagtttaatgacccgaatgcatatagccagtatggcaaaaagattggcgtgaccatatcgagcggctcatggagccagtcgtatgaagtgttcactgatattttcggtcttgcccgtctgaagatcaatttgaacccgggcgaatataatattacgtacaaatactcaaacagtcattataatatcttcggcacatctagcaacactatccatgtctataagatgccggctgtgttgatcgcgaacaacattgtgatgaaaagtaatgaacagcagctctatgagataaatctccgcgatattaataataaccctatcaaaaacatgctggtaaatattgacattgatggtgtgaaatacaattccacgaccaatgatgagggtatcgctaaaatcctgcttagtttgggtgttggaaagcatatcattagttacaattttatcaacccaaattacttgtcctccaacagctcatctgttattctcgtggtcgatagcgataaaatcccgtccaacctgtacagccaggatattaacgcctttgacaatcaaatcctgaatttcacgatccgattgtccgacatgctgaataatagcatcagcagttcggaggtaatccttgagctttttacattttacggcgagtccattattaatattactggtatcaccgattccaacggacgcatcagcttcgacctgaatctcgattacggcaaatacatagcgaacctgcactataacggcaacgcgctgtatctggcgagctactccacgaacacgattaatatcgaatcagcggacaatcgtacaaaaaccattctgttcaatgtagagaccaaactgactaattctaaatattatgttattttgtccgacatcaatggcactttgcttgtcaataaagaaattaaatttatcattggcaataaaacgattacgtccatcacggatgaaaaaggcagggcgtacttggagttaaacctaaacccgaactactacatcatcaaagcgatttttaatggggacaaggactacaaatcagtttcgagtttgaaaaagatcttcatttcaggggaactcacgcatctgtatgctataccactggtgaaatactaccgtaatggcacccagtttcatgcacgccttgtgaatagtaaaggcgttccgttaattaataaaatcctgtctattctgttggaagggaactattataattgcaccactgacgaaaacggctggatcaccctgaatatcgacctgaaaccgggcttttatgatgtggaatgttactattactccaataacacggatgaaaactcgtttgataaaaccaatatcaccgtattatctacggttctgggtcaaagtgaagtgaaatattacggagattacccgtatctgaccattaaatttttagatggtgcgggcaatctcattaaaaacaccagctttgtaatcgatattgacggtaagaaatactctgcacaaactaacgacgagggtattttcaatttcaaccttaatttaaattccggaagtcacctgattagcgtgaacaacccttacgatgggttatttgtgacgtataaattagacattttaaccactatttgctcaaacaacctcgttaaagtctttaacaatggcgtttcatacacggcgcagctgcttgatagctttggaaatcccctgaaaaacaaaaacgtaaaaataattatcaacggtgttctgtattataagaaaaccgatgttaagggtattttagaactgaacatggattttaacccgaaaatttatctggtgaccgtttttaaccccgttaccaaagaatatattgaaaacacagttaaaatcctgccgacccttattaataacaagaacataaatatgtacttctcgaattgcgctttctataaagttcgtgccattggcagtgatggtaaaattgtggaatcgggggtcatcgtgaaaattaaagtgaatggcaaatcctacaaaatcaaaaccaataaagatggttacgctttgtttaagatcaacctgaaaccgggaaaatacataattactgccgagtacaactcatacattgtaagcaacaaaattaatgtaaaatcactgctaaccgccaaaaacatttttcataaaaaagcgaaaaagatcaagttttcatctaaactagttgatattaaaggaaaagcactgaaaggtaaaaagataacgtttaaatttaaaggcaaggtctataaagtgaaaaccaataaaaatggcatagccacacttacgatcaagaatctgaaagtgggcaaatatacgataatgtcaatctggaacaaattccgcatcaaaaacacgattaaaattaaaaaa

SEQ ID NO: 77240 - DNA, 5631 bp, synthetic construct
  source 1..5631: mol_type = other DNA
actgaggagtatctgtcttcggaaaattacgaggaaatccttagcgccgactcgtttaacgataataatattcttgcttccgcgagctacaataaaaccatttatgtcaactacactggagatgactcaggctccggcagtcaaaacagcccgtatgcgacgctgaataaagccatctcgaatgtcaacgattctgataatgcagtggtctatttgagcgcgggccgcttcagtggtgaaaataatacggacctgagcattaacttggctcataggaactataacagcagtttaacgattattggcgcaggtaatggtcaaacgatcctcgatgggaacgatgagtcagccattttcacctcaattagcgcggactctatcgtgactctgatcaacattacatttacacatggcaaatcggaaattggttcagttatgacgacgtcgggcaatctgaccatcgataattgcattttcgataacaattacgcgacgagttcggccgccatttatgccgaaaacacagaggatatcaaaattaccaactcagtattcaaaaacaattatggccatgaggggtgtgcggatttttattgtgaaggcagtgaatcaaccatcatcgatattatcaattcgacctttatcaattcaaccaccccatatttgtatagcttaccctctttcttaatccagtattcaaatgcgaacattattggcaataaatttgaaaatataacgggggtctatcactctggcacctttgagctgaagtatgggtatgggaaacgtaaagtaattaacaatacatttattaactgtaactatacgggaaacaacgatggaggcatcatttacatttcaaatacctaccttaaaaataatcagttcatcaactgcacttcaaaaaaagcgttgatctattctttaacggagtttaatgcatatctcaaatttaagaatgcgacaattaatggcacggaatttaaattatattgtgaagtgaccgatgatttaaacaacagcgtaagcacttatggggaggtgcacttctttattaatgatgaaaagataaagtccagccgctccaacaatggtacggcttccatcagcgtgattaagctgttggataatggtgattacacgctgagcggcacttactactactatgaaaaccccttcgaggttaatgtgaaaaacgcaaccctccacgtggattttaaccacgaccccctcgaactgtgggtctcaaacgatggtaacgatacaactggtaatggaagcgaaaataatccattcaaaacacttaaacatgccctgaattatgggtttgaaaacaccatagatcttactattcacatgaaagacggagtttacacgggcagcgacaacaaagatctgtcttactcaaacgtgggtaaactgacgatttttggtgagtcttatcggaataccatcattgatgccgagaacacaaaaaagattttcaacttcggtgaatatctaaacgtgaccctggccaacctgaccctacgtaacaccagcggcaatgtcattagcgcgtacattctcaaaatctacgactctgttattgagcatgctgattctctgaatggggagtatagtgatacctctaaaataattttcaataatctaacgtacactaacagtggtggcatatacatatacaatgcagagatttacaactccaaatttaaaaattgtaacaacactaaaaataattgccttttacggatcggttcgcttggcaataatatcatccacattgaaaacactacgataatcaacaacaccgttaacgggcgccatggttcttctattgttagcatcagcggcaatagtgtactgatcaataacgactacattaataacactgtgattagcgaaaactcgaagtatattttccagagttattcgaacaaactgatctcggtgaacgaaacgttcataggcaacaatgtgtccagctatatcgcctattatgatattaatggaaacaacgtggaaatcataatcgaaaatattactttcaaaaataactatgtcaaaaccgacggcagcgggctggcgattaagaccggacgaattaaaggtgcaaaatttattaataatacggcgctgaacaatggcggcgcgattatcatcttaccgcattacaccggcagccaggttccgaagtgcattctggaaaatgtcttcttcgagaataatagtgcaaataatggtaaggacatcttcattgaaaaggccaatatcggttacgaaaacggacaactggacaacattacagtcacgtttaacagcttaattacgcacaatctgcaggatattgtgattgcaaatattagtcatgttagtggggctgtgattggtggtggcatgattgaatttgatctgaatggctcatatatgggagtggcagaggttattaacggtgtagcgaaactgaattatctgggcttcaccaaaaacggcaactatacgttgagcggttcatacaactatgaatcaaacaccaccatttataacagtgcggttgtgaatgtaattcttaatccactgaaagaaaacattacttcatatgtgtctgatagtcgcggcgacgatgagaatggaaatggttcatacgaaaacccttacaaaaccattgaaaacgcgctgaacgaaggttataaacagtcgaaagtgatttttatcaaagtcttggagggtaactacaccggtaaattcaacaacaacattacaatttatgatagcctgaacatcacaatcatcggtgaaggaattgataagaccatcatcaccggaaacaacactaaaaacaactggtttataaccgtcttacatgcagggaacggctttctgaagttgataaatatgaccatcagcgaaattaattataattataaaaacatgaatagccaaaaatctgcggttgttattgaaaaaggtgcgaacgtcttcattgatagtgtgaagtttacgaaaaatcgtggatacaacggcggtgcgatcaacaatcaaggtaccctgaacattattaactctattttttacaataatggtgattccagttatggtggttcgatatacaacaaaggtataacaatcattgacaattcatcatttattgcgaatcatgctaaatattgctccgatatgtttaacgagggtattctgaatatttacaactccaatattcaggattcgatgcgtaccaatgggtggacggggaacaccctggtaatcggcggccttggcaatatcagcattatcaattccaaaatttttcgcacgggtaaaatgccgctggaactcattgatccggacgacacgtatgctgataatccggcctttacgatcagcattggcaccattggcagcataacgctgatcaatacgacgatcgatggtcatgacgccaaatatacgggccctaacttctatattaccaataatgctgcgatcagctggtctgtctctacgaatattaaaattcacaactccagtttcctgaatctgaacaacattctaaacaaccaaatggggaatctcataatcaagtcctcctttattaaaaacgtatccaacctgattatgtccaccagcaactataacctcactgtcatcaacagctactttgccgatggcaccatctccactgaaaaatacgatatctccaacatttacctgaataataattggtggggaagcaattcgaaacctacttataaggtcgataacgtggacacaacgccggaaacctggctgatactcacattaaatcagagcaataaagaaagtttactgaaagacattattttatcgtttaaagttactgatggtgaaaacataacagattataccgggtacctgtatccgcggccgtttaccatgtccgctattaacgctacactggaatatgccaacggcaacattattaatcaccttatcaaccagatcaatatggcgaaaaatgccacgagttattatatcgaagctaaaatcgataaccaaaccgttaacctcaccagcaatatcacccataacgttactatcattgcgaatgacatagaatttgattatgggactaaaaccatcactgtgaacgttctgttcgacaacttgtcggcagacgacgaaattatcactctcaaagttaataataaagagtattctactaaaatcaataatggtatagctatctttaacattgacaccctggttcgtggcacctacacactgaactacagtatcaatgcgacggaattgcatgacaatgtaatcaattcatccacgctaattgtaaacggcatagatccaaacattaatgcaagctctaaagcagtgctggttggcaacaacgtgacggtcaccatcacaatcccgtcggacttgacaggcaccatcaacgttatcctgaacaacaaaacctatgtggcggagatccacgataataaagctattgcaatcattcctaacctggcacaggggaactacttagccaacgttatctattcgggcgacgaaaaatacttggctaagaatacaaccctgaacattaaggtcctggaaattaatatttcagcaccgaacgtggagaaatactacaaaggttctgaaaaactgcgagtgatcgtaatcgatagtgaaggcaatgcaattgtgggtcagagcgttcagattaaacttaataacgtaaactacaccgagatcaccaaccaggaagggattgtaagtgtcaatcttgacttaaatgtgggcaaatattcggccaccattctggtgaatgacaaaaaaattaacaccgaaatcactatcaaatccaccatccagggctttaatatgatccgtggctataacagtggactggactatcaagccactttgctgaatgatgatggcaccccactggacaacacgctggtaaaactcaaaatcggcaatagcatctacgaagttcgcagtaatgcgaatggagtggtgaaactgaacaagaagctggcaattggcacctacactgtcttgatcaccaacccgtcgaatttcgaaacacagaccgcgacgctgaagattgtgtcgcgcataaacaataacaaaaacatcattggtgattatctgtcgggctttagctacaaggttcgcatcattggtgataacgggaagtccgtcggcgcgcgtgaaattgtgaagtttaaaattaacaaaaagacgtacaacatcaaaaccgataagaacggttatgcaagcttgaaaataacgttaacgcctaaaacctatcagattactgcgacatacaagggtcaaagtgttaagaacaaaatcaccgtgaagcagatcctgaaaacagcgaaaaaaattaatatccgtaaatctgccaaaaaattgacgcttaaagccacactgaaaaaatccaacaaaaaaccgcttaaaaacaagaagatcaccttcaaatttaaaggtaaaacctacaccacgaaaaccaacaataaaggcatcgccaaaattatcattaagaagaacgtgattaaaaaactcaaggccgggaaaaaatacacggtaaaagtgacctatgtcaaagacatcatcacagggtcagtaaaagttaaaaga

SEQ ID NO: 77241 - DNA, 4974 bp, synthetic construct
  source 1..4974: mol_type = other DNA
atcaacgaaagtgaagtggtcggaaacgcggaaattgaaaataatttaagcagcaccaacgataattttgaagtgtcaaaggatatcggttataacgtctctaaaaagatttcaacggataactccaacgagaatctgcgtaattctcagcacatgacgctcttcataattagcgataacccgggaacaaacattctggataaagcgattttagaactgtccaacgaaaacaagatcaatggtgtcaacctcattattcgtaacggcaatcaagtaaaatcaatgaatgagaatgaattaagttacttgttatcggactgtgacgcgtttatcggtgaatggattagcagtgacgtcgatagcgtcttgaccagtgtgttagtaaaaaaccctgacttgtctaataaaaaattatttcttgtactggaacctcctagcggcaatctgaactcggggtccagttcattgaacctaatccgcaataataccttgaattataataagatcttcacaaactactccaacgaagagctcatcaactattttaagaatacgaaacgtggcaactcatactctaacatcaacaactacttaaccaacggaaacggcaaaaatttcgattccatttttaatcgactggtgctttataaggatttgaacgataaaaataacctgaaaaatcagatcctgtttattctgaattacttgggcgttgacgtgagttatgaacagccaacatttaccggtgttaaaaactatggtatctatcgggatcggtggtactccctggatgagtatatttctactttttttaaggcaaccaataatcgaacggtggggattttagaaagcaaaatgtacattgaaagccagcagcttaacacttgctattcaattatcaacagcttggaatcccgtaactacaatgtcattcctgtctttgcggacggcggcagcgcggaacagttgaaggtcatggttgaatcctggaccagtgcgggcgatgacatcagcggcttcctgtctaattcttctaattttgatgtgtacattgatgcgatcgtctcgatggtggcctacggtgtgggtggggaaaacttcaccaaagcaacatcgtttttcgaagaggcgggtgtgcaggtctttcgtgcggttcactcggatcatgtttcaaatgaacagtgggaactgggttctactggtctgacgaccgaaaaaagcgacaaatggtggcacattacgattgcggaagcgcagggcatcattgatgccaccttcatcggcggtaattcaagttatatatcaaatctcaccggagcgcaaattaccacgtacattccgcatgaggggaacatcgggctgctggcggaccgcatcgattcgtgggtggacctgaaatacaccttaaatgaggataaactgatctctatcatttattataactatccgccgggcaaacaaaacatcgggtccagttatctcgacaccatcaaaagcatttacaacatactttacacgctgaaggctgccggctacacggtgggaagcttgccagtggatgtgagtgagctggaatatctaatgcttacgtgcggtatcaacgtagctacatgggcaccgggggaacttgaaaaaatagcgaaccgctcttgcattactctgctgccggtaagcgaatataactcctggtttaattccctggacgaaattgtacgcatccaagtttcgaacgggaccgttgcctatatcggggagctgactaaacgtgccgtggaactggattataccaaaaccattggcagcaccattgacgactggtataatcaagtggtgtccctgcttcccgatgaaaaatccgttgaagcgaaggaagtgctgagcaatattgtccgtgcgctgaaagattatgcgaacacccattcacaagactattacagactgtacctgaaatatttcgatgagtttaaggaattaaacatccagggcctgaacggatggggtgaaacgccaggcaatgtcatggtagtgaacaagaatggtaccgattactttgtaatccccggcttgaccttcggcaacatcttcgtggcgccggaaccgcagcgcggatgggagtcggatatcaaaaacctgtaccattgcaccgcggttgctccgacacatcagtatctggctgcgtattattatatgcaaacacgcaacccaaacgccatgattttcacgggccgccacgccacccacgaatggttgccgggcaaagaaattcttctgtctgcaaccgattacggctcagttgtggtgggtgatgtaccgcagctctacttttacattagtgatggcttaggtgaagctattcaagcgaaacgtcgcggctttgcagtgattatcagccacctgacttcgccaatgtcctatacgcatctgtatggtaatctcacgtttctggccaatctgatcaatgactaccagaaagcagggagcagttccgaaaaaaataaaatcggcgagaaaatacaagatctgatcattagcaatgattattcaaccaatctgggactcaataagagtcaaatcaaaagcatctctattgattcactgatcgaaaaaattaacatattcctgaaaagcacgcaggatactctgcacccgctgggccttcatgccctcggcgagtattggagcgaagaggatattgctagtaccgtttcggccatgctttcgcatgattttgttctggagaataatcagggcacactgaatttatttacagaactttctaattactactattcaaaaagctatggtgacctcactccgtttgagcgcgaatttgtactgaacaaatcgtatgatatctgtaaagccctgatttactgggatgttaattctgtcagtaacgtattaattaatggcaatgttaaatttaacaattcgaacttctatgcgtgtctgaacttggctaaaagctacatcaaccttatcaatcagagtatttccaatgaactaaacgccatgcttgatggtctgaatggccggtacattccgaccggcgaaggtggggaaatcgttgtcaaacccagcattttacccaccggtacaaacattttccaggatcaatcatctgagctaccaacacaggatgcctggaactacgcaaaaattcttgcactgctgacgctggctgacctcaacgacacgacggagaaaattatcatggggatatggtgcgttgagaccgcccgcgacgacggtgctttggtttcaactgtgctttatctgttgggcatgaaaccggtgtggacgaactcgagcagcgccggctttgatgacgaaggaaatccgacgggcaaaaaagtgggtgcaatgcctgaagtcattaaactcaacgatctgactcgtcctgagggttggaacaaaaaacgcatcgacgtgaccatcattactagcggactgttccgtgatctgtactcgtctcagtctgtgctgatggacaacgcgttccgcgtagccttggcacgcagctatctgaccctgattaataataaaacgctgatgaacggcaagtatggcaaggaactgcgccaggccctggactgcgtcatggagggtataaactattatagggcgtcgaacgaagcgctgaaggataattacgtggcgcagcattggattaaagattgcctatattatttgagtattggttataatgcctcgtatgcaggggagtgcgcaattacccgtatattcgcaccaccgaacggcgattatggggcaggcatatcaaaattggtgagcatgtcctggacttggaacaacaccgacgagctggcgcagttctacttaggtcgaatgggaaacatgtactctaaaaattactggggcgacaccaatcccctcgtctttctaaaagccttatctaactcagacacaataatcaccagccgcaatacaaatcagtatggtgtaatggataatgatgacttctttgattactggggtggtttatccatggctgttgaacatgtttccggtaagtcgccgaaaatgaatgttctgatgtatgctgacaaggataacgcgtacatttcttcgcttgaggaagtcatgtatcgtgaaattgcttcacggtacgacaaccccgagtggattaaaggaatgatgaaagaaggctacagcggggctcgttatatgtccaataagtttgttagcaacctcctgggttggcaagtgacccgtccggatagcgtgtcagatgacctgtggaatcgtgtgtataacacctactataaagacaaatacaatctgggtgtcaaggattggctgatgagtggcaacaatgcctattcccttattagcatgagtggtacaatgttgagttcaattcataagggctattggaatgcggatgatgccacaatcagagatatcgccaacacttgggcgcaggcaaccgttaaaaatggtgtggcctgttgtgattgcagctgtggtaacgtggcgatgatgcagtgggccgttcagtatgtaaatccggatattttagcacagttattgccgaaattatacgacgcaacggaaaatccagtattcctgaacaacactcacaacccaaatacgaaaccggagaacaataacgacccgcaggtagaaccttcaactccgaacccgacggatggttcgtcgagcagttcaacgatttcgaacaacgcaacttccaccaactctaatcagcatagcctgagcaacagtcaaaattcccaaggaaacgcggtttcggatgtgggcgacagcagttccagtgatagcgggacgttcagttcggaaggtgctgatgttaaaaaagccattgagattaatcctatcacccaacagagtgcaagcgaagtggggatgagcctcctggcagttctgggcgtcatctgtctgatcctgatcgtgggcgtcgggtattttcgggataatggaaaagagaaa

SEQ ID NO: 77242 - DNA, 33 bp, synthetic construct; identical to SEQ ID NO: 76711
  source 1..33: mol_type = other DNA

SEQ ID NO: 77243 - DNA, 36 bp, synthetic construct
  source 1..36: mol_type = other DNA
acggaacagatcaccggcctgatttatagctacaac

SEQ ID NO: 77244 - DNA, 60 bp, synthetic construct
  source 1..60: mol_type = other DNA
ctgccaaacatcaccagcatgatccagaatccgatggatgccattgaaattgcgagtccg

SEQ ID NO: 77245 - DNA, 66 bp, synthetic construct
  source 1..66: mol_type = other DNA
atggtgacgactattccgggcagtgaaattttaacctcgggtctgaacatgatctcccagagcctg

SEQ ID NO: 77246 - DNA, 51 bp, synthetic construct
  source 1..51: mol_type = other DNA
ccggggctggctgcgttaggtgcaggcgatgtgaataccctggcgaacgcc

SEQ ID NO: 77247 - DNA, 210 bp, synthetic construct
  source 1..210: mol_type = other DNA
agctggaacatgcagagtattgtgttttcagacacctcgcatgatcagtctcaaagcgttcaggattctcacatgaatgtgactgaggtaagtgagggtcaagaactgaacgacaccttggatagcgtcgaatcctcgggccagggctatatggaaatgggaaaggtgtacaaagatccgtccacggggaaactgatcatggttgaaggt

SEQ ID NO: 77248 - DNA, 2508 bp, synthetic construct
  source 1..2508: mol_type = other DNA
gccgatgacctgcagaccaaatatgcgggtgaagttagcggggacgtgaacgtagtgacggtaaatccgtggaccaccagcggcagtctgacatatgatatcccgtcagaagctaaggatattcgaagtgcagatgtttacgtaaatgtgtatgggggcagcgccaagaacacgtacggcgccaatgcaaatgtaagtttgaagacagcaaatggcgagaatcaaatagcgaatgaatcgctgtggattgaagagggcagcagcgacggtactatctatgcggtgaatgaccacatcaataaatgctattctgactatcagatgcattatgatattacgaactctataaaggggcttaatggctcgtcaattaccattaaagtggacactttcaagatggaaaacaaatcgtttgacggtaaaatcaagctcatcgctttaattctggcatacgatgatggggacagtgatgtcattaactattgggtcgatgccacccagaaatggaccaaaactaacgtgacaacaatattcaataccgaaaaattaagcaacattaatggtgcgaatttaatcaatgttgcgctttccagcggtgatggaagctttaaagttaatggcgaaatcataggagatcctattgtccatgattctggtaactattatcagtacaatagctgggatatctcggataaaatgaaaaaaggtcaaaataccgaactgctgtccatgaacgtggggtctggcagttatgcatctctgaaaaatgtgttgtctgttttgaaagtgaaccctattaaagcgaatgtgtccctagccacagagtatgctgatacgtgctacgccggcactaataacaccatttcaattaatgttatctccgataagaaagagaaatattcaatcgaactgctggcggatggtaacgtggtgaacagtacggaaatcgagctcgacggcgaaaaccagacaatcctgttcctgaccgatccaaccgttcgtgaagtggatgattcaacggtgaatggggccgataatgttaaagtcaactatatggtcaatgtccgctttaacgacgtggtggttagcagcgccaataaaactgtgccggttctatacaacggtaatctgggcaaagatttgtcttatccgtccagcggttttgcaagctttgaaaatatttcatttactggcgatattgtcatcgatattaagaatgaaagttcatacaaatctggttcgacgggtaccattgagattttcaacgttaacctgggtaaagactccactattgtaaaaggatttatttacgttccatacaactggttcaacggaaagaaatatgttgaaaacgagaccatgtttaatgtcaccttcaacaatcagactatctgtccggcgggcttccaccgggaccaaagcaacctgggaaattatggcaagtatggatacggggtagtggtgtatgatgtaaccaactcaattaaaaacggcaacaacacatttgtcttaaacaagattaacccgaccccgacgatctatcccagtacgctgatctacatgtacaacaccaccgggagcgaagtcattaaaaatatctacattattaacggcgcggacctcctttccaacaccagtaacaatgctggccgtgtcgttcaagccaattccaacatcaacattaactcgaaagatattcttgacgcaaaattatatgtatttgcgtctggggctcagactaacgagggcaatatcatcataaataacaacgtctttgaaaacgtgtggaacggcactagtaaaaccacggacctgttcgcgacagatataactgatattgtaaaagactccaacgatatccgttttgttgcgacgggcagcaccattcttgcgctgcagcagttcattgtaaccaccaaggacgcgccaatcaaaactagtgtcaaacccaccaaactgtccacgacgtatgactcaggcaagtattttaatattaaagttctggataatcataaaaaatccgttaaaggtttgaaactgaaactgaaagttttcaccggtaaacgctatgccaattactacgtaacaacgggcagcaatggtgttgcgagctttaaaaaggcttcgaaactgtcgattggaacgcacaaggtggaaattacaaccaataacaaaaattatgtggtgaaaaaaacgatctcttatattaaagtctataaagctaaaaccatcgtgaaggcaccgaagataacggtgaaatttaaaaaatcgaagtattttaaagtcaacgttaaaaacaaagcaacgaaaaaggcggtgaaaaacatcgcagtgaaactcaaagtcttcacaggtaaaaagtacaaaatctacaagatcaaaaccaataaatacggtaccgcctacttaaaaacgaaatacttgaaagtgggcagccataaagtgatcgtatactcgggtaactcgaaatactcaattggtgccaaaagtagcattaaggtacgctgg

SEQ ID NO: 77249 - DNA, 63 bp, synthetic construct
  source 1..63: mol_type = other DNA
acaactatttttaatggtatcaacagcattagtaaacatacgggcaccatggatttcaacacc

SEQ ID NO: 77250 - DNA, 48 bp, synthetic construct
  source 1..48: mol_type = other DNA
agcgatatcgtggacatcggcattcaaaatgcgaacttccagtttatt

SEQ ID NO: 77251 - DNA, 36 bp, synthetic construct
  source 1..36: mol_type = other DNA
tatgatgcgatgcgcggtagcattctgaccggcgac

SEQ ID NO: 77252 - DNA, 2124 bp, synthetic construct
  source 1..2124: mol_type = other DNA
gcaaccgagctgatcagtgacaactccaacggcacgtgtattgtcagctcagctgctgtggctgaggataatcagatcctgggtgaagtggataagccggatctggtggtgaatattacttcggacaatattgatgattactttatacgcgggcggctgaagtccatttacgcctatgctaccctgtgcatctctgaagatattgacgatttgggcatcctgaccatcaaatcaaataatgtgacgattaacgggaacaaccacacattaaaaaatacggttttctcgattgaagccaacggcgtaacattaaacaacatcattctgaatattactgagaaatttgaagacaacgaaaactccgcgattttaatctggcgcgcaaataacgtgaatatttacaacacaaatattaattatattccgccgcaagatactaccgcatatggtatttattcggaaggcaccaaacgtagcctaaactcgaatcttaaaattatcaacaacacgattaactttgaaggaaacaacccgtctgagggtcgtgattacgctgtctgtctggagtactcccccaattgcatctttgaaaacaacacggttaacgcccgcctgccgctcaggaccatagccttcgatctgaccaccgcgtatctgtattctgaatttgcactggcgatggggatcagcaactgcaataattcaacctttaaaggtaacattattaactgtgatgttaatgaacgccctgaatgcagcttcccgaccttggatgccatcttcatttgcgatagcaaggactgcgagtttatcggtaaccaattgacgctgactgatttcaagtcctataaaaatcagccaaattacttgtacggtctcgatatttatcgggcggacaatctccttgttgaagggaacaatattcatgttgagaccagtggaggtacttttgcggcaggaactgcttacccgatccaactgaccgggcctgccagcggaataatcattaaatataacgaaatcttttcaaaatgtaacggtccgaatattggtatctacagccagaacttcaatggtgaaaattatattactatcctgaacaatcatataaatgtgacgggccttgctggtaatcatagttgggcactggtagcgggaattgaggcccaggacgataatgatattatcatgaacaacattatagaaatccacaacattcgcaaaaccaccaaagaggataacttatacggcatctcatattcccaggaaacaaaagggacccactcgtataaagtcgtcaataatactgtcataagcgacggctactacctgtctcatatgttagatgcggacaatacaaccgtaacgaataacacattggtgcgtacctataagtatgccgataccaattacgacccgttcaagcgtggggatgcaataggtaaagacactgatgaaatcaaaaataatgactttagcggcaatcgtgttatcacaatctttgaatatgaaatcgaacagcagggcgatgaaattgacgagggggacgagtttaactatgaaccgccaacgaatacgggcaaccattccaatattattaacggcagtggcatttctccactgaaaccgggcttccccggcggcaacccactgattccaggcagcaattctggaggaacgatcaacaccggcggtaatggtaacgtcggcggcttcacaaatcctgatgtggcggacggtgataaggggtatattggtcttcctgacctgagtggcgacgatggtaaaagtttatcccgtaaatttaaccagcgcgcgaatgtgaaaaccgttaactcatttaataatcaaggtgatgcgagcaactcttataacaatctggtaagcacggaaaactcaacctctagtgaatcccccagcgttaacggcgtcaccgcgagcggcacgatttcgaaatcagcatcgtcggccggtgccgcggggagtagcggtgccgcacaggaaagtctcaaagcgtatgagatcacgaaaaacattgtagaaaacggtccgtacgatatgatcagattcatcggcttggcgatcatctgtgaactgctacttattgtgggctacaaacgaaaa

SEQ ID NO: 77253 - DNA, 5472 bp, synthetic construct
  source 1..5472: mol_type = other DNA
gataacgacacgtttaccaccaacgttagtcagaatatttccaatattaacaccgatgaacaaatcaatatcctgacacagaaaacggaaaatatcaatgaaatccaccaaacaacagaaaacgatcaactgagcttctctatgcatccgccagacgataactattataacaataaaaagggggaaatttatcatacgcagctgatccttacgatcgaaaatttcacaacattcagcactgcgaatactaccatgaatgtccacctagattgggacctgtacatgtcaaaagattattatgatacctgtcagatacgaatctacgaaaacaacacaaaaatccatgcatttaacgtctccgaccagaacaatgcggagtatgaacacaatgcccatcaaacgctagatgtaacgtttccatatacgatcaaagatcgtactgaattgaaagccgtgattctgcagattgaatcgaacacgttatcgtttgaagaaataaaaaaaattaacctgacgaatctgaacaacaacaatattatcgtcaacaatacgtatttttcaaatgaaaactggaccaaccaaatcaaatacttaaagaaagcaatcaatgacgcgccgacgaatagcatcatttacctaaacaatatggaaatcctgaacgacgaggatattacgatcacgatcgacaagaatatcaccatcatcgcgaacaacaccattataaacggattggaccatggcacaatatttacgatcaactcgcaggcaacactcaccctgattaacctcacgttcaccaacatctccaccaattacataatgcagaataacggtaacctgaaaattgtgaacaacaacttcaacaacaacattggccgtctgatctcgaataacggcaatttaacgattgaagacagcattattgaaaataccaccaaatactatgcgctgttccttaacaatatcaaaacaacctccgaaaacggcttaatatacaataaaaaaaccctgaacattaaaaatacgacttttaataatattaacttgaacccgctgacaaacaacaataaaaaattggattggaatgcaatcatcgttaactatgggaaagccattgtaactgactcaaagtttaccaacatcaattatcgcaccatctacaataatgcgatccttgaaataaaaaacacaattatggagaacattacctcaacagacattttttctcacacaattcaatacacccggcagttaaacaatacgggcaaatacttttcttatatccgggcaacctcgtctcttgaaggcggcgccatatacaacatcaaacactcgaccattacaaacaccacctttcagaagatcacgggcaaaagcggtgcgatctacaataaaaaaacgctgaacataacaaacaccacattccagtcgataaacaatggcgcaatctacaacaacgaagatctgaccatatcaaactccaccttccaaaccatcagcggagaagcgatctatactaaaaacgcgaacattaccaatagccgtttccaaacgatctctggcaaagcgctgtacaatattggcacgctcaacatcaacaatatcctgatcaacaaatccacaggaatccataatgatggcatcttaaccataaataatacgatcatcaacaaatgtggaggcatatataacaataaccaattaaacgtcaacaataccctgtttaatcgttgcagcggggttggcgcagccgtatacaataataatattgccaacattgaaaactgtgaaattatcgaaaaccacggcgatgctgataccaagtggagatatgtagagcagccgaatggtcaagtgttttcatatattgttgaagtatattccggcgtcatttataactataaaaatgctaaaattaacattaccaaatcaattattaagaacaatgatatttcagaggaaagcaatgggaactgggatacgtattatggcatcattaaaaatgatggggaaatgaaaattactggctgtattctggacggtaacaaaccaagagagtggattgctttttggggtggtgatgggtcaatcaacatttacaacactggaaagctgacgtacaaatacaattacctgctcaacacgcaatattacaccggaaatattcataaacccagcagctttctttttaacacggggaatggtgcgtgcgatgtcaattataatttttattgcttaaaaccatcgagtatttttgcgaacgcgaattataactattattttgtgccgtacttcggtgagtatattccgattaagcttaatgaaacccgtaacatcactttgtcgctgggtctgaccaatggtgctgattacatgaccttcaatgattgggacaaactgctgactccaggcttaaacgcaaccattaccaccattgacgagaacggtgaatacaaaaacataacaactcttctcaaagacaaatacacttttaatttcaactacacccacgttaaaggcgaatacatcatctacagcaatatcttgaattttaagagcagtgctctggtggatgtgggcaaagaatttgccgagatggaagtcaactacaacaacattacctataaagagggcaacatcacattccatattaaaattaagggaaatctcaccacccaacccaccggaaacatcacgctgcgctacaacaatgagaaaatcatcttgaacctaaccgattccgaatgcagcttcaccattcctgaaatcctgaaaccggacaattatactatgcgtattgattatgatggcgacgatgaatacttcaaaattctcaaccagtattttatttttgctgtgtataaaatccctaccaatattacggtcgtggcgcccgaagttaaatatggtcaaaccggtctgatcaccatcaccatcaccccgggcgaggcgaaattaaaagggaaactctacattaacggcatttacactaaaaacgctgatacccagggccatcggattttgaggattaatcgtaatcctggtgtgtacaacattagtgtggtgttcgaatctgatgagtattatatgggtggcgtggcaaacacgacgtttattgtaagcaaatggaaaaccaatctgaccctgaccggcaaggatattaatgctggtgaggacgcaattgtcaatattactattgatccgggtgatgttcgaggcgacgcgatcttgattattaatggtgtgaaccagacaatatttattaacaacaccgtaacaccgattactattagtaatctgcagaacggcacctatcacgttagtgtttattacccgggtgataaaaaatatgctccgtctaatgccagcacgacttttacggtttcaatgaaaaccacaaaacttaccgtgaacatcactaacaatgatgatctgaccggcaacatccatgttaacactgactataatgattgcactggtgaagtgggcgtgtatattaataatgataatgttttgattatgaacttgactaacgggtcttgtaatttcccagtgaaattcaaacgtggcaacaattacatctacatccattatattggcgacaaatattattcctatgcctcttggaacactacccgctttattgagggaaaagcgattatcaacacaaactacaaccatacgatcgatgagcaggagctcgggtattacattatcaagattttcgacagcgacaacaacccttatgaatatacaaatttcacggccctgttccagaacaaagaaatccacctgactacggatgagaatggtgtggccaaactgccgatacagtgccgtgccggaacctacaacatcacagtcaaatacaaaaataccgtgaaaaagagtacggttgtggtgaatgccacccgcatggatattgacattaaggacattctggcaggcgaaaatgaaacgatcaccatccgcctgccttacaatgcaactggtaacattacgtttaaagtagataatacggtaattagtaaacgcctgagtaacggtctggcgattgtcaacatttctgcgttgactttaggagaacataaactgaccgtcttctacagtggcgacaataattatactgatcagaaaatcgaaaaaatcttcagcatcaaacattccctctcccagatcattgcgtcatcatccggtgtcacatatggtgaggatgttattgtcacgagcaaggttaccagcggcgcgagcgggtcggtgacgtttgtccttaaccacgaaaccattactgtgaatttaactgatagtcaggcgaacgcggcctttacgaatgtgccggcagggaattatgttataactacccgctataatggcgataagacgtataaagggtctgtgtgcgatgttaaaatcaatgttaaaaaagcagtacccaacatcatggttaataccagcccgttactgctgaatgaaaatatccgtattgatgctttgctgaacaatgatgccatgggtaatgtcaccttccatattcaggggcagtatagcccgcgcaaccgtacggtgaataatggcgtcagttcatggctaatcagtccactgagtaaaggttcgtataatctgattgtcacctactgtggggaccggaattatgaatccatcaccacgtcgaaaatccttgtattgaatcagaatgagacggtcttgaatgttaatattggtgatgtaaatgctgacgacgatctgatggtatatgcaacactgaactcggacaataagtacaaaataaccggcaacattactcttgagattaacgataaatactataaggtggttgttagtgatggtgtgggcctgcgcaaccttggtgagtttaaagccggccgctacacttatacggcgacgtatacaggttcagatctgttttctatgtccaccattaaagggtcgtttaatgtacgctgcaatagctataagattacaggaaataaaaacattgttcagtactatggcacctacaagtcttataaggtgcgcttacttaacaacaatgtccctgttaaaaaagcaattattaccgtgaaaataaacaagaaaaacattaaagtgaaaacggacaacaaaggttatgcgacgctgaagctgaaattaaaggccggtaagtatagcattacggcttcttacaaaaaagtcactgttaaaaataaggtaacagtgaaaccgatcctgattacgaagaacatggtggttaagaagggtaaaaccgtaacctatactgccaaactgctcaacaaatatggtaaaaaggtgaaaaataaaaaggtgatcttcaaggtgaaaggtaagaaatacattgtgaaaactaataagaaggggattgccaaaattaaaattaaaaagctgaaagttggaaaatacaaaattcagagcatctatgggaaagtgaaaaacaccaacaccataaaaatcaaa

SEQ ID NO: 77254 - DNA, 2511 bp, synthetic construct
  source 1..2511: mol_type = other DNA
aacatagatgagattggtaacagctcatctgatgacacgattagtctagatgatgatatcagcacgatcaatattgttgataatgagatttccactaacgttgatggagaggtgatttgcgatggtaaaagcacccgggatacctattcttgggctgattttaaatcagaggtcgaaaatgcgaatataaatacaatagagctgaacaaaggcaacattgctccgtcaagcgatagttccaaccagattagtatcaaccatgacatcaatattattggcggttatggttattacatcggcggtgactcgtggagcagttccaccaagtacaactatattccaattattacttctggctctaatctgaatgtaaagttcgaaaacgtgaccttccaatacttatctgacaatgtgttcatgaaattgatggggaacggaaattatacctttaaaaactgcgtctttagcaatatcaatgcaaccggttcacatcagtcagtaatctggctgaactatggacatgctctgattgaaaactgttcttttatcaaatgcaactgcagtttcggtgcggtaactaattattactcctcctggggtacggctgtcaacaacgcgcgcatgacagtgcgcgactctacctttaaagataattatgctacgacggaaccgggagccattaataattgcggccaattagttgtttatgattccacatttgaaaataacgaagcggtttggtgggcgggcgccatccatacacactccaacgcaaacacaaccattattcgttcgaaatttaaaaataattatgcaggctggaacggtggtgccctgtacacatacagttacctcacggtcatcaactcaacgttcaccgccaacacggcgaaaaccaatactgggggaggggctattggcgcaagcagctatatgagcacaccgaaagtggtgattaaaaactcggaatttaaatacaacactgccctgacaggtaatggtggcgccattgtgataagtagcggaaccttgaatgtggaaagtagcgaatttacaaataatacggcacttgaattaaatgggggtgcaatttccagcagcagctgtacggccgccatctctaactgtaaattcatcaacaatacgctgaataaaaccgcgggaaaaggaggggccgtgtatggtacgggcaaaggccgtctgaccgtggataaatgtgaatttattaacaacgcggcgaaagacaacaactcgggccatgcccttgcctattactatacgggcaatagcaacactgccgcgtacttgacctataccaacaatatcttccgtggcaaggacaatgggacggggtctgttttcgtcgctaatgacaaggtaaacatcgttcagtacaacaattcgattgacgatattacgaattacatcgaacctgaaaacaatacaaacggcacgagcagtggaaatatcacaatccctataggcactgatatcctgagctcgtcgtgggatgttatcctgggtgacaacttaaacgggacctcggttattgcgggtaactatattctgattccggcaagccacgatttgtactgttacaactacatcacccaggaccttgtatggaatttcaccaccgaatttggttatttccatgagctgttggtggatggcaatatcgtgtatgcaccggcgtcatgggacgcgctgtatatctttaacctcaccaatggtgaatctctgacgtactccaacatttatcagggctcgagcctctataaaccagtcatttacaataatactctgtatgtatcgagtgaatacggttatggtatcaactccaataattggatttccatgattaagcacgattcggattactactactatggcagtatcctggagctaaataacgtctcttatggcacgccggcaatcttgtcccagccgtatatccacggcaacacgctttatgtgaacaccatacaaggtctgattgcctataacttagttgatggcactagccacaatgtgagcggcactgtcggtaatccaattattgatgccaacggcaacatctgcattctgtcaaacaatggggcggcgattagcctgcttaattccaacctggaagtcgttgcgtcaaccaccctcgatggtacctgcaacaagttaattagtgacgcgaacgggaacatttacactgtggacaacaacggctatatctattacgcgacctacacctcgtcatcaatcacctgcagtaagaccaaattcaacattaatcccgtttcatcggctatggcatgttatgatggtaaactgtacataggcgacaacaacggcatcctgtgggcatttaatactagcaaactcgatgagcccgtactgaataatgcggtatatcgcgtgtttgacgcgggttctgcaatcgtcggcaatattgctgtggacaacgatggcaccatatacattgggaccgataatgggcatttttatgccatcgaatat

SEQ ID NO: 77255 - DNA, 4500 bp, synthetic construct
  source 1..4500: mol_type = other DNA
gatattaatgaaaccaacctcaacgccgattcttttgaaatcgattatgacgattcaatttctagttcatatgataccaatctgcagaaactgaaccaaaacgacattgaaaaaacggatgaatccctggaaaaatccgataattcatcaaatcggctactgaacgaagacaataataacgggttgctgggtgatggggatggtctgaagcatctttacgtggccccaaacgcgactggtagcggtctcgatgaaaacgaccctggagatttcatcaccatcttaaacaacaccgaagataatacggtgatccatatgctggaaggcacgtacctcctgtcaaacatcactccaatttatcaagatggctactaccactttatttcgattaaatcaaagaataacatatcgattgttggcgagaacccggataaagtcaagataatctccaatttaacccctaaaaaacgtacgtcgttcatatttagtttgcacaatactaataacttcaaatttgaaaatattaccttcagcgcgatcaaaaaagatcccaaaaaagagaagacgaagtcttatttccttctgaacaagaataactacatttttgaaaattgcaaatttatcgatgcctattccaaatttgctatcatcgaactggatgagggcactcatctcacgattaataactgttattttacctccacggatggacatgttggacgggaaatatctccccgcttattttgttcagtccttctgaataacacgattttcaaaaattgctgccgctattctgattataaaatcggcgtcatgggtaactatagcatttttaactcgcagtttctcgaatatgatgataacccattattgtattttcagccgtattgtaatctgatttttgagaacaactatgtggaccacccctacaattttgtttttttccaaccgtctgatcattacgagggctcgaaccgcatgttctgctcgcacacaactctgacctttctgaatggcgaggacagcgttaatgtgaactgcggagatgtcattaacctgaacgcgtctctggtagatgatctgggtaatattcttagtctctacaaactgaagttcaatctgtttgaaaacgaccttacatatactaatggggtctatcagaaagaagtgaccgttccggatgtgccgggtgaatattacatcgatgttagtgacgaaatgttcacgaaatatctgggcaattgtacagtgaaagcgccgatttttattgtgaaagaagctccagaatttctgttcgatgacaaaaacagcagcacgtatggggaggatgttatcatcaatgtggactccctggacatcccagatggcaagctgacgttcagattcaacaatagcgaaataatcaagaacatcaccgactaccgctgcagtattaacttgggagtattgcctgccggggaatacgccatcactgcgtattatgcaggtgatgaagtttacggtgcgaaatcatacacaaaaaccttcaatgtaacgaaagcaaaaagcaccatcagcctgactaaaggccatgttgacgccatcaaagataatggtgatgttgggttctacttcagcaccaccgaaaatggcaatgaaaacaccataggtattattctgccggataatgcaactgggaaactgacatttaaattggacaccgatacgtatagtattgacattaccaaacgtaaagtactgctcggcaacttggactacggtagttatattattgcggtgaagtacgatggcgataacaacttcaatgaaagtgaggagtgtacgtttaccctggttaacagtaagccaagcgtggatttaaccttaaactacagtaatattaactacaccaatccgtttaacgtgaacgtaaccttaaaccaggacgtggtgaaagataccatcatctttgaggtgcgagacctggaggacaatctgattaactccactactggaattatcagcaataaatctgcgaatgcgaccttcaccggtctaaatgccggcgaatacaacatcattgcaatttatgaaggtgacgaaacgtactgcaattccattgcaagccagaggtttaatgtgaacaaaatcgatttggaatactttacactaaaggcggacaaaacaatctcgattcacgataacattaaagtggaagctctgattcccgtcaatgtaggtggcagcataacgttccgtataaacggccaggacatgacggtggagatcttcaacaatcgtgcggaggctattttcgataatccgggtttaggcaactacacagtctatgcgacgttcaacggggatgataactataatcctcatgaggaaaacattaatatcactgtcattaaagccgatgctaacctgagtgtgtctgcagaaaacgtggattggggcgaagaattagttgtggttgttaaaaccgacactcgcttcacaggcaatctgtcggtcaaaatagacggggtggagaaaatcgtggaaatcacagaaggccaagggaatgtgtcattctcgaatctgaaagcgggcaaatataatgttgctgtggaatttaatgagagcgaatttttcacgtcctcccagaaagacattaatgtcactgtcaataaaatagatagcgccctaactctggataacgatgagatggtctttgattatggcggctctgcgtccgttacatttggttatgatggtgcagttaatgttacagcggaagtagtgaatcatccggaggctgtaattaagattaatgaggactgcattgtggtgtcggatttggacgcagggcaatataccttgaaagtcacgaccgtgccggatgaaaaccacacgggggtagataaagaatttgaagtgacggtcaacaaaatcgattccgcactgaccctggataatgatgagatggtctttgactacggtggatctgcttcagttacctttgattacgatggcgcagtgaatgttaccgctgaggtagtgaaccatcctgaggcggtaattaagattaacgaggattgtattgtcgtgtcggatttggacgcggggcaatataccttgaaagtcacgactgttccggatgaaaaccacaacagtgtggacaaaaccatcagcattacagtaaataaggtaaacgcaaacatcaacattgaggatattgtcctcgactatggttctcacgacatcacagtatttacgggtgaaggtattgaaagcgtcaatgccaatatcctgaatcagagctatgcaaatgtcatcgtctcgggcaataacatcagcatttacaacctgaatgtaggagaatatgtgctgcagctgattgtgaacccagatgaaaaccacaatagcgtgagcaaaaacgtgaaggtaactgttaataaaatagactcggttattgatattcgtaacgaagtggtcttcacatacggtgacgcgggttattgtgatgtttatagcgagggtgcggtggactttacggtaaaagtaatcaaccatccggaagcagtcattaacatcaacaagaacggtattgtcaaggtgtcagcgctgaatgcgggaacatatattatggaagttaccactaacccggacacgaatcataactccgttaccggtcgtgttaacgtcactgtaaacaaggcggattctaaaatcattattccggacatcatatttgattatggcaattccggcagtgtgaacattctggtttacaatgccaccgggattggcaacgtcaatgtggttggtcatccggaagccatcaccaccattaatggcactaaaatctcggttggcgggttgaatgcgggaagctacattctcaccgctacggcccttacaggtgacaactataacccggtaaacgtcagtgccaatgttattgttaataaactgaccaccattatcggtgtgaaaaaggtgaatggcgtttacggtagttccggcaagcttatcgtgacgctgaaagacagcaatggcaaccttttaactggtaagctgctgcgtgttaaagtaggcagtatttcaaagaccttaaccaccaatcgccatgggcaggtctctgtgaatgtggcatatttaatccctaaaagctacaacgcaaaaatcagctttgcgggtgataatgacttagtcgaatcatcaaacaccgctaaagtggttatcaagaaagccacgccgaaactgaccgccaagacgttaaaaaccaaggtgaaaacaaaaaataaaaagcttaaaatcacgctgaaaaacaaaaaaggaaaagcgcttaaaaacaccaaagttacgctcaagcttaaaggcaaaacgtataaagccaaaaccaacaaaaaaggaattgccaccttcaaaatcaccaaactgaacaaacgcggcacctttaaaggcacagttaaatttgcaggcaacaaatacttcaaagccatcaacaaaaaagtaaaagtgatcgtgaaaaag

SEQ ID NO: 77256 - DNA, 81 bp, synthetic construct
  source 1..81: mol_type = other DNA
ttaccaattaatggcatctatcattatgacgcggattttattctgaacagcttcctgctgcttgatggtttgccgtacgtg

SEQ ID NO: 77257 - DNA, 48 bp, synthetic construct
  source 1..48: mol_type = other DNA
aacacgggcatctttcagccgactcaaattatgaaatatccgccaacc

SEQ ID NO: 77258 - DNA, 33 bp, synthetic construct
  source 1..33: mol_type = other DNA
gccgaacaactggtgcaggcgatttacagctat

SEQ ID NO: 77259 - DNA, 36 bp, synthetic construct; identical to SEQ ID NO: 76728
  source 1..36: mol_type = other DNA

SEQ ID NO: 77260 - DNA, 57 bp, synthetic construct
  source 1..57: mol_type = other DNA
ccaaacattgcgtccagtctgaccaaaaatacgagcccgattactatcgcctcgccg

SEQ ID NO: 77261 - DNA, 66 bp, synthetic construct
  source 1..66: mol_type = other DNA
atggttctgaacattccgggtggggaatttttaaccggctcgctggatgtgatcagtcagagcttg

SEQ ID NO: 77262 - DNA, 51 bp, synthetic construct
  source 1..51: mol_type = other DNA
ccggggttagcggccctgggtgcaggcgatattaataccctggctaacagc

SEQ ID NO: 77263 - DNA, 198 bp, synthetic construct
  source 1..198: mol_type = other DNA
tcgtggaacatgcaggccatgattgatccggaccagtccatccaggagaaaatgcaacagcaaaaaacaaccgaggtggatcagggccaacagttaaatgaaaccccggacacttcaaacagtagcggtcaggggtatacggaaatgggtaaggtttacaaagatccagcgacgggcaaactgattatggtcgaagga

SEQ ID NO: 77264 - DNA, 750 bp, synthetic construct
  source 1..750: mol_type = other DNA
cttctatcaggtgttggaagtagcgaaaacatagacattgtcggttcgacttctgtgcaacctgtggcagagaaactggtcgaaacgtataaacaaacacatcccgatgcgaacattaatgtgcagggcggcgggtcgagcgtaggcatcaaaagcgcacaagatggcagtgcggatatcggcaccagctccaaggagctgaaagaggatgaaaagcagggattaactgagtataatattggtcaggacggtatcgtgatcgcggttaacaatgaaaacactgtcaatgatttgtccaaagatcagttgaaggatatattctccggcaaaatcaccaactggaaccaggttggcgggcaggacggtgaaatcaacattatcacccgtgaagaggggtctggtacgttagatgcctttgaaaatattgtcatgggcaaagatacgaaaattcggagtgatgccgtggtgcagagctctaccgaggctgtgaaacagtcggtcaaacaggatagtaatgcgattggttttgtatcatttgctcacatgtcaaacgatgtgaaggccctgtcgattgggggtgtaagcccaagcacggacaccattgcagacggttcatacgaactgcaacgcccgttcctcttcctggttaaaggaaccccgtccggcgacctgaaagaatttattgactgggttaatagttctgaaggccaaaaagttctgaacgaagaaaaaattatcaagagcacaaat

SEQ ID NO: 77265 - DNA, 81 bp, synthetic construct
  source 1..81: mol_type = other DNA
ctgccggcgtttcaggattacggtttcattcaatttctgttcggccagacctggagcccaaacgaagggcagtatggctta

SEQ ID NO: 77266 - DNA, 33 bp, synthetic construct
  source 1..33: mol_type = other DNA
cgcttctattttgggggcaccggttttagcatt

SEQ ID NO: 77267 - DNA, 105 bp, synthetic construct
  source 1..105: mol_type = other DNA
gcaggcaatgtgccgggtatcccgaactccattttttcgccagttcgcacgctgaccagcaacattgccctggaaatgagttatgcgactgggttacatcacaat

SEQ ID NO: 77268 - DNA, 75 bp, synthetic construct
  source 1..75: mol_type = other DNA
gccgtgccgatcctgagtttcgattttatctttggtcaggttattgacgcgggcaaaagcggcgggatttcccca

SEQ ID NO: 77269 - DNA, 102 bp, synthetic construct
  source 1..102: mol_type = other DNA
gtgggtagtgcgaccacgatcccaattagcatgtttgatcccgggcgcccgctgccgttgcatttatatgttctggccactgaaggcgtctcgcttcctaac

SEQ ID NO: 77270 - DNA, 42 bp, synthetic construct
  source 1..42: mol_type = other DNA
gaacacattttacgcgattatctgaatattatccatggcaac

SEQ ID NO: 77271 - DNA, 48 bp, synthetic construct
  source 1..48: mol_type = other DNA
tttggccagagcaccgcgttaacgttcccaattcataacatcccgctg

SEQ ID NO: 77272 - DNA, 60 bp, synthetic construct
  source 1..60: mol_type = other DNA
ccggaaattagtgatggcggtcattttatgatggacatgctggatgtggcgatgccaagc

SEQ ID NO: 77273 - DNA, 639 bp, synthetic construct
  source 1..639: mol_type = other DNA
gaaagcgatgccgttcaagatacgggtggcgagagtacgagccgcatcattaatgtcaaagttatctggaacgacgatggccagacgaataatcgccctgactcagtcactgtacggcttctcaataacgggagtgtggtggacagcgtaatcttgaacgaatccaacttttggaatggtaccttcaagatcctggataacggaaattatgacgtggaagagaccggtgatctgtcgtcgtattcgatctctttaactggcgatatggataacggcttcgtcatcaccaacactatcaagcaagcgccgaacaacggcagtgatgatatgattgtggacgaaaatagcaccgacaactcatcagacgatgttaatggtattattgacgattccaaccataccgttgaccagaatgatgctaaagatgaaaatcagaccgagaatatttcccaggcaaaaaatacaacgtacaataataatgataaagaaaaacaggtaataaaaaaagaaaacaaatctgtgaaaaagaacaacacaaacatcacggggattaaactgaaaaacacaggactgccggttgtggttctggtggtcgtgctatttattatagtcattaccccaattagccgttggaagaaa

SEQ ID NO: 77274 - DNA, 141 bp, synthetic construct
  source 1..141: mol_type = other DNA
attactaatgtcccgggcaatctggtgcaaatcattcaggaatattctaccagtatcaacgccacagctgcggttaactcgacggcgtccgccatgccagctgtaagcagtgcgagctgggcagcactgggtacctcatta

SEQ ID NO: 77275 - DNA, 3579 bp, synthetic construct
  source 1..3579: mol_type = other DNA
gataaccagacaaacctcggtttaaacagtaacgatgtaatgctgagcgatagctattatttcgatgcgaacgttgatgatgacttggggaatggctcattggactttccttataaacagctgaagagtaacagagttatagacaattctaccatctatctgaatgatggaatctattacggctttaataaagaatttagcaacctgactgtcatcgggaaaaacagcgaaaaaactattataaaaaatattcagtttgatatcaagggtagcctgatcattcaaaacgtaactctgatcaattcgaaaatcaccaataacgccaacatcaccctggtgaactcaattttcaaagattctagcagcttcatcggcggggtgctgaagtcaaacccgaatacctttgtaacgatcacgaactgcacctttctgaataaccatgccaaccgctatgcgggcgtgatttattccaataattcgaatctgaatatctgcaactcaagttttgttggcaactatgcgaattactatggtggcgcgatctactgtgagaaaaacagcaagctgacaattatcaacactgatttcacaaataaccatgcaaaaaatgatgcgggaggcgcgatctatggtatggattcagatattcttgccaactacctgagtattagcaactcttcatccactttcggtggtgccataacggcactcaatacaaatttgaatttaaccaatttcaacgcgtggaacaacaaagcaaaataccgtggcggggttatttactcagtgtatggttactacattgtgatgaactccacctttgaaaacaacaccgccagcgatggaggtgcgttatttattgactcaccacatagcgtgaatgtgagctccaacaaattcattaaaaacaacgctctgaacatcggtggcgctgtttacatcattagcaacaaaaattatttcattcctgataatctgttcttaaataactctgcaagtttcaacaacgatttttacaagaccatgctgtctaacctgacgatcggcaataataactacgtgctgattaattataatggaagccatatcggtaacctgccaagcagttatgacctgcgggaactgaatcagacaacgagcgtaaagaatcagggatcggggggtaattgttgggcatttgcggcgatcgctagtttggaatcctgcattctcaaggctacaggcaacgcctataacctttctgaagagaacatgaaaaacctaatgaccctgtactccaattatggatggaaagtgtctccgaatgatgggggctatacgagcatgggcattggatatcttacttcctggctgggtgcgatcaacgaaagcgatgattcctattatgagtcatctgccttaagcccagtacttgacagttttattcacgtgcaaaacattctctttctcaaacggaatagttatactgataacgatgaaataaaacgcgctatcattgaacatggtgctgtctcaacaagtgtcttttggaaagtagagaaatatgctaatggtgaaaattactataactacgaatatgcttcgggttctaatcacgcggtagttattgtcggctgggacgataactattcgaaaaataattttattaagaaggcgcccggcgatggcgcatggataattaaaaacagttggggtacggggagtggtgatggcggctattactacgtgtcttattacgatgcacgtttagcaccgataaacacgtcatcggttacttacacctttgtgctggccgactcgattaaatatgacaaaaattatcagtacgatatcccgggcatgacggattacctactgaacagctcggaccgtgtctggtacaaaaataagtttaccgcgactgacgacgaatatctgaccgctgtgtcgacctacttccaaaaagaaacgtcctgggacttgagcatctacgtaaataataaactgatgttgactcagtcaggtaactctagtgccagctacagcaccatcgagttaaaccgattcatcattcttaaaaaaggtgacattttcgaaattgaatttaaaattacggttgatggggatgcgggggttccgatctcagaaatcgcgtctcttaataacctgttttatggtgagaacattagctatgtgagttatgacgggaaaaagtggattgatctcttcgatgtacgctggacctatcctggccacacctataacgactcgcaagtcgcgtgtattaaagccttcacggtattgaataaaattaactccaccatcgtcctcacgattacagacgagaataatccggttgagattacggcgaaagtgctgaaccagtatggcaatccgattaaaacgggtaaagtcacctttaatattgaaggcaaagattacattgcgaaaatcaataacggatttgcaaaattgattcacatttttaacgggaacgaaaataaactaatcattgcgtctttcagcggtgccggctttatcgaatcgttctccgatataacattctgcccggagcaggtttcaatcaaagccagcgacatggtttcatattataataaaaattcgtactccatcaccttgctggacatatacagtaagccggtcgcagataaggaagttaaatttaaaatcaacaatctggaatatgtggcaatcactaatgaaaatggtattgccgcaattacatttaacctgtaccctaatgtgtatgacgtgatcattgggtttaactcgatcaattttgacaactacaacgtgacgaaaaaaatcactatcaaatctaccatttccattcccgaaaataccgtctatacctataatagcaaatacccaattaaactgttaaacaacaacggcaatccgttatccaactgtaagttcaaacttgtgattaatggcatcacaaactatgcccatactgattcgaatggtgcgtttaaatacaatattaacctgaaaccgggaaaacacacgataaccgtgatcaataccaagacaggtgagaaatcgacccaaaaaattaaggttgtcagccgtatcacgcagaataaagacttttccatgtactacggtgctggtcgcaattataaggttaaagttgcagatgattatggcaaagttaagaaaaaccttaaaatatcttttagggtgaacggcaagacctattaccgttatacgaacgaaaaaggttacgcatatctgaagatttcgctgaagccgggcaaatacacgatcacggccaactacaaggggtataaagtctccaataaaattcgtgtgaaacccaccatcatcacgaaaagtattgccgtcaaaaaaggaaaaaccggcaaattcaccgccaaactgttgaataacaaaggcaagattttaaaatacaaaacaatcaacttcaaattccgcggcaaaacctacaaagtgaaaaccaataaatacggcatcgcgactctgaagattgcgaaaaaatataaaattacccgctatagcattattacgagttatcgtagtgagaaaataaagaacaccattaagattaaacgc

SEQ ID NO: 77276 - DNA, 3534 bp, synthetic construct
  source 1..3534: mol_type = other DNA
ctcaacgtggatgataatgcgacaatcgaagatacgaacttgaatagtatggacgttaactttgatatttccaacggcgaatttaatagcattaacattgataaaacgttcgacacaaatatagatgcggatgccggcaaagacacaaacattgaggaaaagaccatcagtattaccaattcgaacaattccattctttccaccaaagagaataatgttaaaaataattttaaattaaattccggttccctgcgtgccggtaatatcatctacattagctctgatggtaccggggacggtttgactagcaacaatcccacaaactgggctaacggatacattaatgcgcagtccggcgatacaattagcttccttgatggaacgtataacctggtcaacgtaaatttaaacaaagatctggttttaaaagcttttaacgaaggcaacgccataatcaatgccaatcgtgcgggcaatgtctttagcattaataacaatcggaatatcaccatcaacggtctgacatttatcaatgggaaatctacgggaaatggtggcgcaatttcatttaattccggcgccctaaccgtaattaactgccgttttattaataataccgcaagttcttatgggggcgcaatatatctgcgcgacggaaagctgaccatagtcaacaccacgttcgtaaataattcagcggatgttggtggcgccgccatcgcggacaccattagtattacccactcggatttcattaacaataccgccgatggttcgggtggggcgatacgcgcgtatgacaacctgacaattgtcgattcgatttttacgaataacacttctatcaatggccaagggggagcgctgtatacgccaaacgtcgacatcaataatagcatttttgttaataacacttcactgaacggtggcggggcaatctactccagcaatgaatatctgattaacaattctgtattcgttaataactcggctatcgatggcgatggcggagcagtgtcctcataccgtaccggcaacataaacaattcgaattttaccaacaacagcgctaagaaaagtggcggcgcagcctatgcgcgtgagagcattgagattgataattcgagcttcaacaaaaattacgctggtgcgggtggcgccgtacgtgctcagagcgaagtgaacattactaactcaaattttaccaacaacgtggctaacaatgagggtggcgccatctattcgaacggcaaaattgttgttaacaatctgacgtttatcaacaacagcgcgattgaaagcgatggtggcgccatcttctctgtcgaagacgtggaggtcgataactccaattttatcaataactatgcaggtgaacttggcggggcgatcagtgcgtacaacgaacttactgtgaataactcgaacttcaccaacaacaatgccaaatactatggtggcggcgtttacgctaacgtgttgaatagtaatcgcgacaactttgttaacaacactgcagaatataatggcggcggagcgtatgtattctctaatgcgaacattaacgggtcaaattttgattcaaacactgcggtgaacggcggaggattgttcagcaccggcaactcgagtgttaataattctaatttcattaacaataacgcttatgacggctctgccattatcagtggcaacctgcacctgaacaataacaatctggaaaataacacatcgcgcggttatggaattgtatatgccgaaaacgcaacgatcgaaaacaataagtttatagataacgatgcactggaagataaagagatctacgtcttaaacgaactgagccagagcaacaatacgttaagccctaaccagatcgaaaacattaacgcgaacacagtcaaagtgaatacgattaatggtacgacctatttggtggatctggaagatgggctcaaaggctattgcctccagcgcacactgaacttcccggattatgtatacctgctgaacaaccttagcctggcacataaccagttgacgggtgaagatgtgagcgaatacctgaagattctgatttataaatattacttctccgataagaaagacaacatcacgtacagtctgtgggactttacagacagtgattttagaaacagcaataacaatctgaccaaaaaagtcattgccttatacaattcgggattccgtgtacccgattcgaacgcgagcctgatattggacaatggtacgcaagtactctttgatttttatagtgctggcagttcaacaacccaaaacttattcctatttaatattacatacatgggcaacaattatgacatgaaagttgaaaaaattacactgaacaaatctgtcattaacggcaataaaaccaaattcatcattcgggtcaccaacattggtgataccatcctccatggtgtgacggtatttgaaaaagagtacgatgggctggtgtatgatagctatattgacgaaggaaacaattggaactataacaacggtaaatggatctacaaaaagcaactgaacattaatgaaagcgccgaatttacggtggtatttaaaacaatcaaatccggtaacttcaccaatatcatcatttcatcctccaatgaaacgaccaataaaaccaccaacaataccactactgtttacacgcctaacctcactgtggagaagctgtcgttgaatcgcactgtatacgtggggaatcagaccgtctttaccatcgtggtccgtaataccggggactgtgatctgggtgaggtttttgtcgttgaaaaagcgccagaaggtctggcgtacagttcatttaaaggcaccgactggtcatacaacaacggcaagtttacctatggtaaaaccttaaaggtgggtgagtcggttagctttgagatcgtgttcgatgcggttagttctggtaactggaccaatgtcgtggtggcaggttcaaacctgaccgggaataaaacgggcaataacacgacgaaggtgtataatccgggtttgaaggttgaaaaaatcacgttggacccggtggtgtctgttggtgagattacctcttttgaaatcatcgtgactaatactggcgactgtaaacttggcgatgttttcgtgcatgaagacagctatgaaggcttaaggttccatagcttccgcggtgacatgtggaaacagaaaggggatactttctattaccagggggttttaaacccgggtgagtcagcatcatttgtcattctgtttactacgctgaaaccgggcaacttcaccaatatcgtgactgccgggtccaatgtgactaacaacaccaccactgagaacaaaaccaaggtaatagaaaaccacacgaacaataatacgaatggcattaataaaaccgttaataatgaaaccaaagaggtgaacgtgcataaggtcgatacgagccgcgcgacggggaatccgctgctagcactgctcatggtgcttcttatgatcagtgtgacatctgttcgaaaattcaaaaaa

SEQ ID NO: 77277 - DNA, 4746 bp, synthetic construct
  source 1..4746: mol_type = other DNA
accgataataatattacggatatcaataatgtgaactctaatttgtccaacgtcttgaaaagctcgtctagcctgaatgatggagatgctatttcatatgacctgatggataataaagatgttatttctcaaaaattttcgtcaaacagtaacacaaacgataagtcaaacatgtcggacgtggtcgactctattgaatcggttgcagaacctaccagcttggatagcccgatcctcaggtcggtggtgcctagcggcattacattcgatggagtattccatgttggtacgggacaacagtattcaaacatacaggacgcactggaccagtgccgccggggcggctacaactatcagattatcatccatgaaggcacatataccggctatgggaataaaaatctggttattgagcctaccacgtggtggaacccgaatttcggctacctggacattcgcaccgcaaatgacggtgacgtggtaatcctgaacgcagaacgctccccaagcattctgacgattaactcccgcaatgtccacattaccggcttgacattcatgaacgcgtataattatggcagcgggggcacatcgggtgcgggcgtcgcgatcaatattcgaaaaggaaccgtatcgatagataattgttcttttatcaataacgaagcgcgcaatctttggggcggcgcagtccatatcgattcatccatcacaaatcgtatctctaacatcgatatcacaaactccctgtttgttaacaatagtgcggaggtagggggagcattccgttctgaacggtactctagcaatatcaatatcattaacaccaccttcattaacaataccgccactgaacatggtggcgtagcatgcctgtttagtacagatgtgacattcgcaaactgtacttttatcaataactcggccccttcatctggaggcatccattttcatgtcggcggatcacatatcgacaattgcacgttcataaacaatagcgcctacgggacgggttcgtcggaagaaggttatggcggcgccattgcgctcgtgtatagtaccagtgatggcgttattatttccaactctagcttttccaacaactttgccgggaaatacggcggtgccattgatgtaaatggcagcggcagcaacgcgaaaatactgaactgcaactttgaaaacaacaccgccggctatggtggcgcgatccgtgtgcaggggtctaacaccgtgatcgataataacagcctgattaacaacaaagccattaataccgatggtgggggcatccatgtggaagggtccaatactcagatttcaaacacgattttccgaaataattcggcggccgcgaatggcggcgctctggccattgtggcgggcgataatacattcgtgtccaactcagtcattgctaataacacggctgtgaacggcgcgggcgcctatatccaaggaagacgcgtaactatctccgattccattgtcgccaacaataccgcagaccaaaacggcgcaggagtctacattgatggaagttacgctacgataaaagactctaccatctacaataataatgccactgttaacggtggtggcgcgtacatcaacgggcgcgatgcgaccatctccaacgttaacttcgtgttaaacaacgcgatcccggacgaagaagcgttggatgatggtcttggtggcgccatttttattgctggtagtaacagctacatcgaggacagcaactttacctataacactgctcgtaatggttctgcgatttacatcgatccgaccagttctatagcaaataattatatttataactgcaacttcaccgaaaatcaggcgtggagctattggttaccgattttctacaacgatgtaactaaaacgattgaatctaatttaaccggtggaaataatatactgaacgctatctacaacaacggcagcaaccttcacatcttcatcgacggcgtaaacccggttctgggctgggaaaactcgcaaaatggtacaataatgtatcaggataaccgtgagtttaatcagaccattgtaacgcttgtctgggatcgccacggtaatttagtatttaatgaaactgcagtcacggacctggcaggcaatgtgtgttatgatattccgcaagatacacacttatggtttatagtgagtatgacccatctcgaggacacctattataaagaaattactaatatcacgggtatcaatattaatccgggtctgaccattaccgatgtcacaatgtatgagggtaattcaaccccccaaaccatctatattgtgctggccgatgatgatgccaatccgataccaaacgaaggcccaatcatgatttacgtcatggttaacggtaacaagatccttcttggtagtgggaacactagcaagaacgcagtactgattcttaatgaaagcgctgtctttaaaacactcaatcccggcaattacaccattattgcagaatgtacatacgcatactacaacgaaacgactcagtccatctctaataaaacggtatcaacggaaggtatcctagaagtgctgccatatatctggagtcttaacaaaacgatttctcacgtcaatggtattccatatattgagggtatggtcatccagatcaatgacaacgttacctttaacattacggtatttaacgaagttaacacgacgctgtatggattaaaattaattgatctgaataccgaaggattaagctacgtctcgaccctgccgtccaattggaattatgaaggtaataatgtatggacactagataacctagttaactatggaaattcatcactcttcgtcacctttaaagtactgaaaacgggcaatctgaccaacattgtgaactgcagctttctggacggtttcaaaaacaaaagcgcgaacatcacgtttgcagtgaatttaactgccgatttgggggtgagtaaggttgttaatgtttcgaacccgaattacggtgatttcattaagtataccgtagtggtgtcgaacgcgggccctgatgatgcgacgggcgttgttgttaatgagactctgcccgtgggcctggtttatgtcagcgacgatgcatccgtggggagttacgatcacgtggcggggttgtggacggtgggttccctggccaaaggcgacagcgctactttgatcgtcgtggtgcgtgttggggggacgggcaacatccagaactttgtgaatgtgagcggtgcggagtatgataataatacggggaataacaaggccaatgtgactgtggcggttaacgccagtgcggatttgggtgtgagtaaggtggtgaacgtgtcgaacccgaactacggcgattttattaagtacaccgtagttgtttcgaatgccggtccggatgatgcgacgggggtggtcgttaatgagactttgccggtgggcctggtttatgtgagcgacgacgccagtgttggtagttatgaccacgttgcgggtttgtggaccgttggcagcctggcgaaaggcgatagtgctacgttgattgtcgttgtgcgtgtgggcggtactggcaatattcagaactttgtgaatgtcagtggtgcggagtatgacaataacaccggtaataacaaggccaacgtgaccgtggctgtgaatcagctgaaaacctatattatcgtctttaacaataccgtctacccaggggacgatgtcaccgttattgtgacggtgaccacccagaacggttcactctttaacgggaatgttaacgtggctttaaacgacactgcaaacacgacgaaagtggtgactattgtcgatggtacaggctcctttaaggttacagtggataaaaatcttgttaatggctacgtaatcggtattaatgctagttatgatgggaatgatacgtatatcggatcgaaaggttttggttggatcaaggttctgcccgtcaaattccacgtcgaaaaaacgattgtaaaaggcaacgagtttttcattggcgatgagataatatttaatattaccgtctataacgattgtaacggtaccctgtacaacctggtggtttccgacgtcctgcctaacggtgtggtgctgatcaacagcggtttcgggctgtggacctacgatggcggctcttcgtggtcctatggcgatctgagcgcaggcgccagcgcgaccctgattattaagtcgagtgcagtgaaagccggcagcttcacgaacgacgcgaaagctacagtaaacgatgttcttgacaattccagcctggtggacttcagcatttcaaaactgaacacgagcatcagcgtatccaacgttacagggcatccgggggatgtagttgtcataactattaaagtgagcactggagacaacgtgccgtttaatggtgatgttgacgttatcttactcgatggtaaaaaaattatcgtgcatgtaaccaatggtattgccaagtttaaatggaccattccgaaaaacgcgaagaataataccatctttagcattttcgtatcattcgcggggagttcaaaatacttcggatctaacaatacgggatttatcaaagtaattgacaacaaacaaaacaaaaccaaccataccgacaacaatgattttactgacaaatgcaataaagggattatcaaaaataccggtaacccactcctggttctgttaatctcaattgtcattctggtcatctcactcaaacgtcggaaagactat

SEQ ID NO: 77278 - DNA, 42 bp, synthetic construct
  source 1..42: mol_type = other DNA
agtcagaccccggcgaacgatgacaatagcattcgctttggc

SEQ ID NO: 77279 - DNA, 81 bp, synthetic construct
  source 1..81: mol_type = other DNA
aacgacctgaatattgtgtccaccgcaattaacgcgtttttacaaatgggcagtcagatcatcagctgcatggccgatccg

SEQ ID NO: 77280 - DNA, 45 bp, synthetic construct
  source 1..45: mol_type = other DNA
gcgggctttgaaagcgtgggcgttaccaacgtcacggggttcggt

SEQ ID NO: 77281 - DNA, 105 bp, synthetic construct
  source 1..105: mol_type = other DNA
tataccacgatcctgggtggcgaagaccaagcattgattgcgattatgaaatcatcgccgttatcctttaacggggtgttcactgccctgagtcagagcgatgct

SEQ ID NO: 77282 - DNA, 60 bp, synthetic construct
  source 1..60: mol_type = other DNA
ggtgatgttgggaccgcgaactatttggtgggcgtcctgaaaaatacgctgccgcagttt

SEQ ID NO: 77283 - DNA, 36 bp, synthetic construct; identical to SEQ ID NO: 76752
  source 1..36: mol_type = other DNA

SEQ ID NO: 77284 - DNA, 450 bp, synthetic construct
  source 1..450: mol_type = other DNA
aactcgttctcgctgatcttcaatgataatggcaccaatgatgccaacgacgttaacgaaagtatgataacggttggcgcatcaagtctgccggaaatcgaaaactttaccgacaacactctcaatgatacaactattagtttagtggattcaaataaaaacatgacaattttggtgagcgagattgacaattcccagtcaattagcgacatctttaataactttgtaagctctaacgatatcagttccacccagaccattgaccaaaatggtgtcaccacgtatctggcgtacagcagcggctcggattcgtataacgctgatattttctttaacaaaaacgggcagaattattgtatcagcggagataacattctttcttcagattccgattactttataaatcattgcaagggtattatcgacgcgatttctatcaattccacgagc

SEQ ID NO: 77285 - DNA, 39 bp, synthetic construct
  source 1..39: mol_type = other DNA
gtgccggcaattgcccaggattttgcgatgaataacgtt

SEQ ID NO: 77286 - DNA, 33 bp, synthetic construct; identical to SEQ ID NO: 76755
  source 1..33: mol_type = other DNA

SEQ ID NO: 77287 - DNA, 54 bp, synthetic construct
  source 1..54: mol_type = other DNA
attatgggcaacctggaattaagcccgcagtatacgaccatgattatccaagcg

SEQ ID NO: 77288 - DNA, 621 bp, synthetic construct
  source 1..621: mol_type = other DNA
gttggcaaccggtttttcataccgcattacgaaacaattgccgacacggatatagggactgtagaagtggctacgtacggcaatgcaaacgcgacaaaatgcattgcactgattacgggaatccatccccgcgaaacactggcgattaatccggaaattgatgcagccaagcagttcgccaacgacgatgtcaaaatcattcattataaagtcactgtgaccaaaaacgcccaggactacagcaaaggccgtgcgaatggggaaagtctggttcacaattatgtgaatccgaacgttaccgcgtctgatgctgatgctgttattatcagccactcccacattcctgaatatggtgaaggcttttatgtagcgactccagccatggacaacgcctcggtgaagatcggtgagaatatcaaccaaagcagtgattttaactattatccggtcaccggtaacgagacctacaaatccacgtcggcggtgcttgtttcaaaaccgattgcggaggcaggttacccaacctttgtatacgaagtgcctgaaaatgtcatggagtttatcatcaccggcaaaaccaaggatttattccagttgatcattgaaaacacgtatgataat

SEQ ID NO: 77289 - DNA, 2883 bp, synthetic construct
  source 1..2883: mol_type = other DNA
tcagacaatacaacggatgactcggtcattgactcctctaatcgtgatgttgtgagcgtcgacgataacaacgttgttagtgacgaatacgcggttaataaagtttcgaacggggcgctggctgatgttaatggtgaggagaatgtaaacaacgacgttgacatggtcatcgatcctataaacaatgtatcggtacttcagggcgataatgtggatgtgaacatcacggtgaagaatattggggaaaacaatgcgtcgaatgtgacagtcaattttgaactgccggatggcttctccctgattgattctaacaacgtctcagacaatacttggcacatcggcgatctgcagtcaagtaaatctaccaacatcactgtgaaattaaataactcaggcattaataatggtgattatgtgattaacctgaccctacgtgcgaacgaagggattgaagaaatttttaaacagaatgtcaccgtcaatgtgataaaaaaactgattcagacaaacttaacgatcgattttgataaagagtcctacgtctatggtgacgatgtgggcattgatgttaagttaccggacgacgctacagggaatgtgaccataaaaatcaacggcaccgaaaacaacgcaagcattaacgaggtactcattctctcgaacttgactcccggcaactacgaagttaacgtgacctatagtggggacgacaaatataacggcagctcggggaaggcgcgtttcaccatctccaaagccaacaccaccgcggccattgatattgtcagtattaaagttgatgatgagttaaatattactattaattatgactcggaaattaacgggaacgccacgatctatgtggacaatattaaaaaccaaaccattgaaattattgacggcaatggcaatgtcacgatcaaaggcctgtccaaaggaatgtacgacatcaaagtcgcatttgatggaaacgattgctataacagctccgagaccaacaaaacgattgaaatctcgaagaacacagtaaacatgctgatcaacgtaggcgatatcgtttatggtaatgatttggtgattaacctcaaactgccggataacttaacttccaatgtcacggtaagtctgggtgacatcaatcgcagcattaactgcagcggcaacgtaacctttaaggacatgaacgcgggcaattatactgccatcgtaagctatggcggtgatgaaaactactttaatgaaaccaaatacgtggacttcaaaatatataaagcgagtacacaaaccactgtcaacacatcagatattaacatcggcggagtgttaaatgtcagcgttgatccgaagatcgacggaaccgcgactgtgtatctgaatggaactaagtacagcgatgatattgtaattgttaatggtagcggcaatgtggtgatctccaacttaatcgaaggcacgtacaatgttcttgcggtctttaacggcaatgataattacaactcctcactgaccaacaaatccattaaagtatcacgcaatgtttttaacattactgttaacgtgaccgatgtttgttatggtcaggatgtaatcattaatattaccttgccgggggatgtgaccaacaccgtagatgtcgtgtttggttataacagccaaaatattaatcttgagaatggtgtgggcacggttaaattcagcgatctggatgtgggaaactacaacgcaacggtgatctattatggtgatgctaaatacctgaaaagcactcagatcattagtttcaacgttacgaaagctaaacccacagtggatgttaacatctcaggcaacaagcttggtcaggacctcgtgataaatattgccttgcctagtgatgtcaaaaacaatgtgacggttggcatagacaatatcagccaggacgtgaaagtcacaaatggtgtgggtaaggcaatcttcaaagatctgaccattggcgagcatgtgctcatcatcgactatagtggtgattctaactacctaaatacgactgaaggcatttatttcaatgtctcgaaagcaatcccggtcattgatattgacgtgaaaaacatatatgtgaaaggtaaggaagtgatcgatatagctctgccagatgatgcaaccggttctgtaaccatctttatcaacggcgttgaacaaaagacagttaatgataacattagcagcattgtgctgaccaaatctggtctggcggccggtacctacaacgtgatggttagctataccggagattcgaaatatgaatctgcaaacaccacggtgcagtttaaggtgtcaaagtacaaagctaaattgaccgcctcatcaaaaacgtacaatgtgaaagtaaaaaccaaatattactacattacgctgaaaaacaacaagaacaaagtaatgaaaaagatcaaagtctacttgaaagttaatggtgtcacctactccgctaccaccaatagctatgggaaggcatcgttcaaacttagcaaactgacgaaaaagggaacctatgatgcgctgattacatataagggcactagttactacaataaacttacgaagaaagtgactattgcggttaaagcaacgccaaaactgacggcgtactctgccaaactcaagaaatctgttaatgccaaaaagtatagcgtaacgctgcggacggacaaatacaaagccatgaagtatacaaaagttaccctgaaagtgaatggtaaaatctatacgctgaaaacaaatagtctggggaaagccacgtttaaaatcaccaatttgaataaaaaagcgaaattcctggcagttattagttattctggtagcaaatactattattctgccactaaaaaagtgatcctgaccgtccgc

SEQ ID NO: 77290 - DNA, 54 bp, synthetic construct
  source 1..54: mol_type = other DNA
ggtattatcgttgccgatccgtccacgatggtgaccctgggcagtttgtttagc

SEQ ID NO: 77291 - DNA, 120 bp, synthetic construct
  source 1..120: mol_type = other DNA
gctggttttggtgttggcgacatcgcgatgccatccgtgccgactgaatttgtcagtacaaccattgatacctctgtattcggcgcatttgcctcggggttcagccagctgttcacgaac

SEQ ID NO: 77292 - DNA, 3144 bp, synthetic construct
  source 1..3144: mol_type = other DNA
aaagaaatatatgtgagctctgatgggagcgatgatctgaacggtaccgatctgaataacccgtgtagttttcacaaggcaattaacatttctgaagatggcgattctatcaaaatgaaggccggtaattattccattagcgaggaagtcgacaaatcgctgaacattagcgcatatagtgatgatgtcgttaacatcaagaacaaatttagctacgtgtttaaggtcaaaaacaacaatagcctagttctcaactctttaaactttaaaaatttcaacaccgctattgaatcatactcatatcccaatatcatgatcaaaaactgcttatttgagaaaagtagctacatgtgtctcaatatgcggggaggcaccactattataacagactcaatctttaggaacaataccggtagccaggggagtgccattaactttcaaaacacgttatataaaaatcgtagctatctgcacatcaataacaccatttttgattcaaaccatggtaccaacttgggcggagtgatctacatttcgctttccaacatgtatctttataataatactttcattaacaataaagccggatatacgggcggcgtaatctttaatgatgtatcgaaagtctatgacaatcgttctcgttacatcaataacggtgccctttactctggcggggcgatttacatccgcggtgataaagacctgggttcgtattatggagatcatgtggaatttatcaacaattcggccccatacaaaaatggtgattcgggagggtatgggacttctggcggcgcgttcaccgcagtagatggtggcgaaatcgtgctcaagaacagtgttctggaaggcaataaagcaatgtcacgcgggggtgccatttggagcgaccagaaagtgagtattatcaacacgctgatctcaaataattctgcgtataatgaaaccggcctcactgtgggcgggggcttgtattgcccgcttctgaaggtaaacataatcaattctacattcagcaacaaccatgccaaggaatatcctgatattttcaatgatatcacatttccttccgtggatattgttgaaaacattaacaataccgatgggaaaaaaattagcattaaaaatctgactaaaccagtatcatattgcttgcaacctggaattttaaatattgcgtcatctccaataattgagactggcaccaacaaactgctggggtctggcggctatttcaacgggaagccgatcggcgaactgttgaaaatctttatcgttcagaattatcagcgtgtgcttgacaagaaaatcagtgaaaacacctttaaaagcatgttggggtttatcagcagtggctgctcctccctaccttcgccctttaacgattcgtactacctgagccaccgcctgatcaaagagactctagatgaatatgagaaaggcgttcgctaccccgatgtaaacgcaacaggtccaattaactggctgacaaaaaaatacctgacattcgacttctatcaattctcaaacgaagatcaccaggacttgattgtgttcacattcaacgagtccaacaccactctgaatccaccgatcaacgtaacaaaaaaatccaacaccaccaatccggacttcaacactgttgtatcttatgttataacggtaaaaaacaccaataaaacaagcatggttttcgatgcgctggtcattgacaccctgagtgaaggactggtttataatggtgcgtcccataacggagtatacaacaataccacgaacaccgtcacctggattctcaacattccggctgatagtgaaattaacctgtttgttaacgcgaccgtggaaaaattcggcaagcttaacaatacagttaatgttttcaataaaactgcaaatgtgacggtcaatgtgccaaacacggatgtaaccaaagctgtgaatgttacacgcccgagtttcaatgacacgatttgctatacgattaccgtgtttaaccgtaatccgaacgtcgatctgatgaaccttgtagttcgcgacgtgctcgacgatggtctggtcttcaacggagcgtccagcgggggcgtttttgaccctatttcgcgcacgatcatttggacgatcaacattaccaaaggtggccaggcggtgatttacgtgaatgtcaccgtcaataaatatggcatgctcgtgaacaaagtttttgtggataacaaaaccgccaattcgacggtgtacgtgccgatcgaaccgccggtgaacccggacatgacggttgtgaaactgagcttgaatcggaccgtgtacgtcggtaaccagacggtcttcactattgttgtccgtaatactggtgattgtgatctgggggaggtttttgttgttgaaaaagctccggaaggtctggcgtacagttcctttaaaggcacggactggtcatacagcaatggcaaatttacttatggtaaggtgctgaaagtcaatgagtctgctggctttgagattgtattcgatgcagtgagtccgggcaattggacgaatgttgttgtggccggttccaacttaacagacaataaaacgggtaataacacgacgaaggtctataagccggacatggctgtggagaagctgagcttgaaccgaaccgtgtatgttggtaatcagaccgtatttacgattgtcgtccgtaatactggtgattgtgatttaggcgatgtctttgttgttgaaaaagcgccaatgggactggtatacaactcctttaaaggcaccgactggtcatacagcaacggcaaattcacctacggtaaggtgttaaaagtcaatgagtcggcgagctttgatatcgtatttgacaccatcagtccgggtaattggacgaacgtggtggtggcaggttccaatgtaaccgataacaaaaccggcaataacacgaccaaggtctacaaaccgccggtgaatccccctgtgaagccgcccgtcaaccctccggtgaatccacataaaatagaaaaacccgataatgaaaaagacaagattattaaaaaagactcgagcatcaacatccgtaaaacaggtaatagcatattcctgatgatgttatcggtgattatctcaattccgctgatcagacgcaatcaaaaa

SEQ ID NO: 77293 - DNA, 507 bp, synthetic construct
  source 1..507: mol_type = other DNA
ttcattggatcatctaacgtgacactgatggcaggcgatagttgcatcacgctgccatcggattacatgttagataacaaagggattgcctataaaaacgacattggtatcttctttatttccgtatccggtaacagtccgaaagatcagaaagaactgtttgatgccatcaaatctaacggcaaatcaagcggctataaaaatgtcactaaggacaaggttaatggctttaagctttatgaatacgaagcgaatcctgataaactcaagaacgtgtcgtcggatcgtaaaatcagtggtagctacgaaacgtggaaaacctatagcccgtatactccctacgaagacgtaagcgatatggacgtgaccaaattccgctacatcgcttatgttaacgaaaatacggacgatatttcagaattgtacatatttacaaataataccaatgtcgatctgtattccggggagatcaccaaaattattgacagcattgcggttgtggaggag

SEQ ID NO: 77294 - DNA, 156 bp, synthetic construct
  source 1..156: mol_type = other DNA
ggttattttggcctcagcgacaacgcgctggagtctgatagcagtttaaatgaatcacatgatgatgtggtttatctgtggatgcttgatgacaacgacaatctgaaattgattccgaccacggaaacttacagcgaagggtccggcagtaactcg

SEQ ID NO: 77295 - DNA, 957 bp, synthetic construct
  source 1..957: mol_type = other DNA
tatgaaaattatgatgacttcgtttttaacaatattacaatagatgattccggtcatgatgatacgaagcttattgacgaaaaaagcttttactattacgaagaggatagtggttacctgtcggacaatattgttggtggcaagaatatcaagaacacgaccggcgtagtgatggcggatgacgagtacagttgcggcgccgcatccttcgccacggttttaaacaacctggggaataacattaccctgtatgaagcgaaaatcgcaaccaacacgaccttaaatggtacgaccatgaaaggaatcatcgatgcgactaaaaaatatgacctgatgggcgtgggggtgaaactggaaaccgtacagctgaaagaaaactacattgtgaacatgaacattttgggtattactcactggtctgtggtgaaagaaattaatgaagagtttatcattctggccgatagtaatttgggtaactataaatttgacatcatggaatttaatcagtactatacgaatcagacaatcgttattcttaacaaacaacaatataacaatcatatcagtattgtcagcaacaatacgaactacattagcaatattgatcaaaaatatatttcgggtaatggatatgccttctacgtaagcaaatccatgtcatatatcaacgcgaaccctaaagggtacgcattcaaatacaccattatcgtcccgaaatggggcggcaaggtcgtgaaactatctacaaaaaaactcaccaaacatcgcatcacagtcaaagtgatctataagataaaagtttattcgaagtcacattttaaaggcaaggtagagactattcaccagccggctatttttaatctggctcataaagcgggcaccaaattttctgtcagccgtcccacctccttcccgatccagtcaataaagtacactgttagctattcgcacttccca

SEQ ID NO: 77296 - DNA, 66 bp, synthetic construct
  source 1..66: mol_type = other DNA
ctgagccattatgcggtgatggcaccggaaaccacggtttttactcagcaagccatgttagatgct

SEQ ID NO: 77297 - DNA, 123 bp, synthetic construct
  source 1..123: mol_type = other DNA
gggccgtccctggatattgcaaacttcttcatcgaaagtattggcgcctatatgaatgactttatccgtatgagctttcgcacggctgcgtcgggtaccgttgcgcagcagggctgggtgcaa

SEQ ID NO: 77298 - DNA, 87 bp, synthetic construct
  source 1..87: mol_type = other DNA
gcgatgaatggtacgaccccggggagtcctatcattaaaatgccaattagcaacatgttatttggcatcttcaaccagtatccgctg

SEQ ID NO: 77299 - DNA, 48 bp, synthetic construct; identical to SEQ ID NO: 76768
  source 1..48: mol_type = other DNA

SEQ ID NO: 77300 - DNA, 429 bp, synthetic construct
  source 1..429: mol_type = other DNA
ttttttagcggtggtgatagcgtgaatgtgacggatgtgggcatgactgtaaactataattacaaaacgaacgtggcatttacaatcatcccaactgataccatcactgaagtcaacaatgtgcagttaaagaacattgaggttacgtaccacaacggtaagacccaacatctggaggatgttacctttaactccaaaaatacgtatgttaaagacaatgaatatgggttcaaattcgactataccatcagtgacgattgcattgacggtctggatgaatacgatttcggccatgccacacaccatattaaaggggatattgtaataaacaccgtcggcggaaatgaaaaagtggttggccacattgactatgatgtcccggcgtcggctaccgtctataaatactctagcggaagtggctcagtaatt

SEQ ID NO: 77301 - DNA, 405 bp, synthetic construct
  source 1..405: mol_type = other DNA
gtggaaacaaccactcacgatttcgatggtttgttcaacatgagtgttccgagcgacgaggagtttgtcaccctggactcgaacatcacgggtgcgagcgtatttgggtataatttcaattacggcgacccaattggcgacaacatcattgtgtattactttaacgagtccattgtggatgataacgatacgaacatcacggaatatgtgattaacattcttgatgaaaattctacttttaaacatccgagcgtggaagatggcttcaccgtattatacaatcagatggttcaacatgatggaggctatatgctcatcgcatcaaatgataacgaaaccgaagtcgtcggtattgttggggacaatctggacgatctgaaaacatatgccaatagtatagaattt

SEQ ID NO: 77302 - DNA, 270 bp, synthetic construct
  source 1..270: mol_type = other DNA
gcgtcagaaaacattgatgatagtaaattcagtgaagaatccgatctggacgaagtggatagcgacctcgatgaagtcgattcagatttggatgaagttgatagcgacctggatgacctgaacgacgacagcgacctagatgatttaaatgatgactccgatctggatgagttcgatgacgattctgaccttgatgagtttgacgatgattcggatctggatgaatttgacgatgattctgacttggacgagtttgacgatgactcggat

SEQ ID NO: 77303 - DNA, 255 bp, synthetic construct
  source 1..255: mol_type = other DNA
tacaaccagcgtagcagtagctattcatccggccatgactatatctttctggataatttagccagctcgtcttacagcaattatttccggagtgatctgaaaaacctgaagatcaaaacgtccaatggtactgaatgccaggtagtctacattccgtcttatggatcgcaaggcgcggctattcttgcacgcgtgagtgttggtcagatttcacaaaacacaaaactcctgttggacgtgcacgataccgggacc

SEQ ID NO: 77304 - DNA, 48 bp, synthetic construct
  source 1..48: mol_type = other DNA
aatgatacctatagtcagtttttcatgaactactccggcctgagctcg

SEQ ID NO: 77305 - DNA, 36 bp, synthetic construct
  source 1..36: mol_type = other DNA
aacgtttttgtgaacgataatgcgacctatcatggc

SEQ ID NO: 77306 - DNA, 66 bp, synthetic construct; identical to SEQ ID NO: 76775
  source 1..66: mol_type = other DNA

SEQ ID NO: 77307 - DNA, 48 bp, synthetic construct
  source 1..48: mol_type = other DNA
gccagtagctttgacgcgtataatcagggctccgatgaagagggtaac

SEQ ID NO: 77308 - DNA, 33 bp, synthetic construct; identical to SEQ ID NO: 76777
  source 1..33: mol_type = other DNA

SEQ ID NO: 77309 - DNA, 117 bp, synthetic construct
  source 1..117: mol_type = other DNA
agttttgaacaggatgaaattacgcatgttgtgaatatgatcgtgccgtccgaaagcaacattatggcccaagcgaactatgtaaaagatgcagacggcgtcacctactgcgagctg

SEQ ID NO: 77310 - DNA, 33 bp, synthetic construct; identical to SEQ ID NO: 76779
  source 1..33: mol_type = other DNA

SEQ ID NO: 77311 - DNA, 171 bp, synthetic construct
  source 1..171: mol_type = other DNA
ctggatgaggcgatcaaaaaaggcctgttaggtgaagcaaaagacattgctccgggcgcctcgcttcaggaattgaacatccgcaaaccagtaaccgacacgattagtattgatactgttggtggggtcctgaatgttaacaaggatgtgtttgactccgatatagtgagc

SEQ ID NO: 77312 - DNA, 240 bp, synthetic construct
  source 1..240: mol_type = other DNA
gctaatcgcattgaatacaacatttacgacacgttaattagcagtccgaatgttccacaatataacacgactcaaaccgacgataccatggatgcgttcggtaactttgtgatcaaagcacaggaagcctttaaaggcaatgcgggcgccggggcagatcttaccatcatggctgagtcttacaaaacactgtcgtatgtaaaacagttggcgtattcctcaaacaagctggtccagccg

SEQ ID NO: 77313 - DNA, 51 bp, synthetic construct
  source 1..51: mol_type = other DNA
acccaggcggatggcggcagcctgatcggtgaaaaacaatatattgggttt

SEQ ID NO: 77314 - DNA, 60 bp, synthetic construct
  source 1..60: mol_type = other DNA
agcaaagtgggtattttgctgaacaagccggggttagcgctgaaaggcacctgccgccca

SEQ ID NO: 77315 - DNA, 144 bp, synthetic construct
  source 1..144: mol_type = other DNA
cttggtgaagccaaagatattgcgccaggcgcaacgttacaggagctgaacgtgcgcaaaccgatcagtgaaaccattagcatcgacactattgggggcgttctgaacgtctcagctcaaatgttggattccaatctgatatcg

SEQ ID NO: 77316 - DNA, 138 bp, synthetic construct
  source 1..138: mol_type = other DNA
cgctctatcgaaaaggcggccattgacatgattatgaatagttcgaaagtggcgacgtacaacttcgaatccggcgatgatactggtatgaccatcctgaaagctcaggagaaatttaaagaatcagcagggagctat

SEQ ID NO: 77317 - DNA, 63 bp, synthetic construct
  source 1..63: mol_type = other DNA
gtgtcctataaaagtttgacgaccctgaaatcggatattttttcaagcaaccgccaggttgaa

SEQ ID NO: 77318 - DNA, 42 bp, synthetic construct
  source 1..42: mol_type = other DNA
agcgaaatgggtgataaaacctatattggcatggactacatc

SEQ ID NO: 77319 - DNA, 57 bp, synthetic construct
  source 1..57: mol_type = other DNA
aacagcattgcgtactggctgttacagaataaaaaaaaatataagaaacgcgatcat

SEQ ID NO: 77320 - DNA, 36 bp, synthetic construct; identical to SEQ ID NO: 76789
  source 1..36: mol_type = other DNA

SEQ ID NO: 77321 - DNA, 42 bp, synthetic construct
  source 1..42: mol_type = other DNA
gaatatgtggatatggcgattcgcaccgaggcctacatccgt

SEQ ID NO: 77322 - DNA, 39 bp, synthetic construct
  source 1..39: mol_type = other DNA
gccttagcgattatcagtaagatgaaactgtatagcaaa

SEQ ID NO: 77323 - DNA, 48 bp, synthetic construct
  source 1..48: mol_type = other DNA
cagaaaacggacaagaaaaccattaacgatgcgagcctgggcaaaggt

SEQ ID NO: 77324 - DNA, 54 bp, synthetic construct
  source 1..54: mol_type = other DNA
caagtttattatcgcattgcgaaaagcctgggctacgatgtccagtttgtgcat

SEQ ID NO: 77325 - DNA, 57 bp, synthetic construct
  source 1..57: mol_type = other DNA
accacgagtggcaacgtgaaaagcatttggtgcgaagatggttacctgatcgcgtat

SEQ ID NO: 77326 - DNA, 48 bp, synthetic construct
  source 1..48: mol_type = other DNA
aacgccctgctggttgtggctccggattttgcgaaagcacagaatttg

SEQ ID NO: 77327 - DNA, 36 bp, synthetic construct
  source 1..36: mol_type = other DNA
aacccactgatgggcggtgaaattatcagcccggat

SEQ ID NO: 77328 - DNA, 81 bp, synthetic construct
  source 1..81: mol_type = other DNA
ttacgcgattatttcattggcagcattcgtaacagtatgggtaatgactatgtgaacgttatcgcgccgtttctgaattac

SEQ ID NO: 77329 - DNA, 648 bp, synthetic construct
  source 1..648: mol_type = other DNA
ggcgaatcagtcgggctcgaagtaaacgtgaataactactataacgacaccaatttagctgatggttggatttatagcccaaacctggatatgaatttcattgacgatgtgaacaacctgactccgacgacccagagtgagcgccaactggttttagattcgattgcggactttagcaataaccctgagattaaactgcattttatcgaaaacaataccataagcaaattctatcttatggatggtgaaccattgaatatctctgatgaagatggtgtgtggctggataaaagtttcgccgacgcgaagaatttgaaggtgggcgacaacattacgtttgagtttaacggctttaaaatcaaaaaagaaattaagggaatcggctattcgccggaatacgtatatcacgcatcaactagctccgtcatcccggatttcaacaaaattggtttcgcctacatgtcgtacaaagcatttccgacagataacattccctataacgttctgaatgtcaaattcaccggctctccggaggaatataataatctgctaagcgacaaacttgatggggagtacaattcatttgttgaacagtccgaacatagcagtgtgtctcaattttccgaagaaatcaatcagcacaaaatg

SEQ ID NO: 77330 - DNA, 69 bp, synthetic construct
  source 1..69: mol_type = other DNA
ccacagttattttatccgtcgatgagttcaacctacaaactgccttcctggaacccggcgtggagcatg

SEQ ID NO: 77331 - DNA, 564 bp, synthetic construct
  source 1..564: mol_type = other DNA
atgtacgatggcatgaatgatttaaaggagtgggagtttaaccagataaatcattatgacagcaaattagtcattgacaatgacgcatccctatccgaaatcgatgatgtcgcccgcgatgttgacggcgataaaatcatggaaagcgctatcgaaattgaatcggattcggcgaaaaagtctggttctctgatagccctgaaccacacggatttgatcaccccaaccgattatgactggaataaaatggagatcggcgatgatgaagtgagcatttcacaaaaaatggcggacatgctggatatcagtgtgggggacacagtaaaatggcatattattggttcggacaaatggattaaaacaaaaattgataagatccacgcagacccgacctcacagggaatcgtaatgagtagcgataaactcgaaaaccttgatctgaactacacgccgaccagcattgtgactgaacagcatgttgacaaaaattattccattattaaaaccgtgaacagtatgaaggatattacttctagctgggatgaactgacggagtcaatgtgg

SEQ ID NO: 77332 - DNA, 54 bp, synthetic construct
  source 1..54: mol_type = other DNA
aaaatgatgtgggacagctcaggcgatagtttttatattctgccgtccatctcg

SEQ ID NO: 77333 - DNA, 630 bp, synthetic construct
  source 1..630: mol_type = other DNA
gaatattacggattggaacagacaagtgcggacttttataatgaaactaatctggctgatggctggatctataaaaccagtttcgataacgcagatctggataaaataaacaacctggcaatgcagaccgaacgccaacatgtaatttcctctgtcggggaatttgacaacgatcctgacattacactgcattttgtagaaaacaatacgatctctaaattccatgtgttccaaggcaaagactttgatattaatgatgagtccggtgtctggttggataagcgtttcgccgattccaaagagttaaatgtcggcgacaatattacgtttaaattcgatggcaaaaccatcgaaaaggagattaaaggtattgggtattcgccggagtatgtgtacgaatcatcggcgacgagcatcactccaaattttgaggatgttggtttcgcctacttatcgtacaagagctatccggacaacgttgaatttaaccggctgctggttaaatataaccagtcagatgattctttcaaagaaaagcttgatgactcaatcagctacctcagctttaccaaacaggaagaccacgtgagcgtggctcagtttagtgaggaaatggcgcaacacaaaatg

SEQ ID NO: 77334 - DNA, 69 bp, synthetic construct
  source 1..69: mol_type = other DNA
ccaaaaatgttctatccgagtatgacgactcgctacaccctgccgagctggaaccctggctttgatatg

SEQ ID NO: 77335 - DNA, 567 bp, synthetic construct
  source 1..567: mol_type = other DNA
atgaacgacagcatggatgatctgaaaacctgggaatatgatgacattaaccattttgagagcaaactggtgatcagcaataatgcgagccaggaagaactgtattacgtaattaacggaactaacggcagttttatcatgcagatgcccattgaaatcaagtcgaacaatcacgaaaacacgggcgtgctgctggtttcaaacaataccgacttgatatcgtacacggatagtaacaaaaatccgattgaaattaaggaaggggatattagcatctcaaccaagttggcacaggattttaatttaagtattggtgataaaatcaaatggcacattgtgggcaacgacgactgggttaaatccgagatcggccaaattcatgccgaacctatctcccaaggtctgataatgtctccggatactctcgaagatgaaggtttaaatttcacaccaacctccattctaacgtcagaaaaattcggggagaacatcaattccattaaatctgtctctacacttgaggacatggaggaaagttggagcgagatgacctcgtcggtcatgatg

SEQ ID NO: 77336 - DNA, 54 bp, synthetic construct; identical to SEQ ID NO: 76805
  source 1..54: mol_type = other DNA

SEQ ID NO: 77337 - DNA, 636 bp, synthetic construct
  source 1..636: mol_type = other DNA
ctgttcatgacaccggacttaagccatgaaacgaagaatatcttagtcctcgcctctgataaagaggaacagccgaacggtggagtcgatatggcattcatgatccgtctggaaaacgggtcactgaaaaactacactcccatatatccgggtggcatgacccacccgaccaaatcggccccgggaggcctacagggccctatgatgctgcacgactgcctctggaatgggctgggtgaaggtatgcagaacgcaaaggaaattgtagaagtgcgtacgggcatgcatgctgatgccgtcgttgtggtgtatgataaaggtattgacagcattattgattcaatccgcccacttaaaattaatggtacggagacgaaccttagtgctaccgacatcattcgccaaaacgatgcctacaatggctatccgggtaatgagcatgtgcagggcaccatgtcgcggtccgatgcggtgatggtattggctaaagcgctggcgaataccgcgaaagatcctgttaagaaaagtaccatggttcagaccgcgctgaaagaatactccaacgggaatatcatcatggaaccacaaggctcttttacaaaattgctggcaactaaaggctttgagagcattact

SEQ ID NO: 77338 - DNA, 33 bp, synthetic construct
  source 1..33: mol_type = other DNA
gtgagcggcttaggggcggatgccctggcaggt

SEQ ID NO: 77339 - DNA, 51 bp, synthetic construct
  source 1..51: mol_type = other DNA
atcctgaacgccatgggcgcggggcagacgattggttacgcaaccgattat

SEQ ID NO: 77340 - DNA, 36 bp, synthetic construct
  source 1..36: mol_type = other DNA
acgtttgtcggcagtaccgatagcgtggcggtttat

SEQ ID NO: 77341 - DNA, 69 bp, synthetic construct
  source 1..69: mol_type = other DNA
ggggatatttccagcgtttttgcgtcttcgggtagttcagtgcgcatcgccgcagaactgaccggcttc

SEQ ID NO: 77342 - DNA, 114 bp, synthetic construct
  source 1..114: mol_type = other DNA
attaacagcaccgacattacaacgaacttcagtgcgatgaatctgccgccatcctttgaacatctgttcggtaccgattggttaggccgcgatatgtttatccgtactttgaaa

SEQ ID NO: 77343 - DNA, 90 bp, synthetic construct
  source 1..90: mol_type = other DNA
acgttcctgggctttggcttagccccgcatgaaccagcaattgggattatcctgagcgagagtatgaaatatttggcgaccggtaactgg

SEQ ID NO: 77344 - DNA, 204 bp, synthetic construct
  source 1..204: mol_type = other DNA
atgtccccgataaaccctgtaaaaacctacatcagtgcgctggggtcagtttcttcggaaaaaatcgcaattttggaggcctattggggcgtgaatgaaccgatcactaccaaggtgattagctggttaggtaaaatcgtgcagggcgattttggtacgagcctgattttccgtatgccagttattgacgtcattaaagaacgc

SEQ ID NO: 77345 - DNA, 87 bp, synthetic construct
  source 1..87: mol_type = other DNA
gtctatctgggttggtttccaaccggcttgggcgttccgatcgggacgttaagtgagaacgtgagcatttgggaatggctgcatcgc

SEQ ID NO: 77346 - DNA, 69 bp, synthetic construct
  source 1..69: mol_type = other DNA
gaacagatctttacctatccgggtattgggcaagcggcagttagtgccggcctgaaaagcgatgtgcca

SEQ ID NO: 77347 - DNA, 1557 bp, synthetic construct
  source 1..1557: mol_type = other DNA
atgagtggcggcaacaccagcacgcgcgccgacaatgaattagtcgtttctgcgtttgtgcatggcagtgaaccggaaaccggttacgacccgatgtatgggtggggcgaccgtggcgaaccgctcattcaatcaactttgatgaagatgaatcgtaacatgacctatgacaacgatctggcgaccagctggtcgtcgaacaataactttactgaatatacggtaaatatccgggatggcgttaaatttacggacaacaccaccttagatgctgaggatgtggcattttcctataatcaagccaagagcacgggcaatacaattgatctgagcagcctcgacaatgtgagtgccattaataagaccactattaaattcaagctgaataaaccagattcaacatttaccgacaaactgctgcacgtcggtatcgtaccgagcgattcgtatgacaataacacgtatggcagtaacccgatagggtctggccccttcaaacttgcccagtgggataaaggtcagcaggtaatctttgagaaaaatccgaactattatggaaaacagccgaagttcgataaattgacaattagcttccagaaaaacgaagcgagctttaatgccgctaaaaatcatgagctggatattgcggccgtgccgctgtcttatgcgaatgaaacaatcgatggttaccactcctttttatccgaaagcaatgacgtgcgcggcatttcgcttcccatgaaaaacaacacgggggaaactaatgaggatggcatcgcgttaggaaataatgtgacggcggataagagcatccgcctggctctgaactatggtattaaccgcgaagacatttgcaaaggtgccctgaacggtgccggcgtacctaactacgatgggatcgctcatttcctgccgtggtacaacaatgattccacgatcaaggatgcagacattgacaaagcgaaagatttcttgaagaaagggggctggaaagacaccgatggtgacggaatcgtggaaaaagatggtaagaaagcaagctttaacctatactattcctcagatgcaccggagcgacaggcaattgcggtggcggtttcagaacaagcaaaagaatttggtattgagataaatgccacaggttctaattgggatgaaatagataaaatcaaatttagtgaaccagttgtctggggcttcggttctactgatccttatgtcatgtacggagagtactatagtaatcaggcaggtattggatacaacaacccatcacttgttaacaacagtgctgtggactcacatattgacaaagccatgtcggaaccccgtgagcagtcatatgctgactggtctgcggtttcgtgggatggtcagaccggcatttccccaaaaggggatgcggcatggctgtggatcagcgaaatcaaatacacctactttgtcgatgatagcctggatatttccaaagataccttcaaactgcaacctcacgggggcgacctcttcggcaacatctacgattggacgcgtatctcgccgattaacgcgaccaac

SEQ ID NO: 77348 - DNA, 1545 bp, synthetic construct
  source 1..1545: mol_type = other DNA
ggcggcccgtctactgaacgagccgacaatgagttaatagtggcggcttacagtcatggtggcgaaccggaagctggttttgatccgatccttggctggaactactacagcgagcccttgatccagtccacgttgctgaaaatgacacgcggcatggaatatgaaaatgatctggctaaaagctgggaggccaatagtgattttacggaatatacagtcaaaatccgtgacgatgttaaattcacagacaacacgactctagatgcggaggatgtcgccttcacctataacgaagcgaaaaaaagtggagcaagcctggatctctcgagcatggaaaatgccaccgcagtagacaaacaaacgattaaatttgagctgaaccggccggactccacgttcgtggataagtttgcgtacattggtattgtgccgtcggattcatacaacaacgaaacctatggggcgaatcccatagggagcggaccatttaaattcgtgcaatgggacaagggccagcaagtgatcctggagaaaaacccggactactatggcaaagagatcaaatttgataaactgacaattctgttcgaacagaacgaagcagcctttaatgcggcgaaaaataaagaagtcgatatcgcggccgtaccgttgtcttatgccaatgaaactgtcgatgggtacaatatgcacctcatggacaccattgatgtgcgtggcctttcgttaccagtgcagaacaataccggtaaactgagcgaagatggcaatccgatcggcaacaacattacggcagacaaatcaattcgtgaagctctcaattatggtgttaatcgcaccgccatctgcaaaggggccctgaatggtatcggcgtgcccaactacgatggtatcgcgcatctgctgccatgggcaaataatgaatctgccattgatgatggtgatgttgataaagcgaaagacatcttgaaaaaagggggctggaaagacaccgatggcgatgggattgtggaaaaggacggtaagaaagcatcaataaacgtgtattacagctcgaacgcacctgagcgccaagctattgcggttactattgctgaggaagccaaagagtttggtattgaagttaacgcaaccggttcaaactgggacgagatggataaaattaaaaacacggacccggtcgtgtggggatttggttccactgacccgtcgaccatgtggtccgaatactatagtgaccaggcaaccgtcggctataacaatccagcccttattaacaacagtgctgtagataagcatattgataatgcgatgaagtctgatcgtgaaagctcctatgcggaatggtcggcggtaagctgggatggtcagacggggatttcacctaagggtgatgcagcgtggttatgggttggcgaaattaagtatggatatttcgttgatgaaagtctggacatctccaacaataccgagctgatccagcctcacggcggagatatcttcggcaacatctatgattggagccgcgtatctagcattgaaaag

SEQ ID NO: 77349 - DNA, 1536 bp, synthetic construct
  source 1..1536: mol_type = other DNA
tcgcatgacagcgacccaacccatctgactgtcgctgcacacagtaatatcaaagaaccggaggcggggtttaatccgcttactggttggggctgtggacaccagaactacaatcccctcgttcagagttgtttattcaaaacggacaaaaatggtagtattgtgccggatcttgctactggttatagcgtcagcggggatgggaaaacgtggacggttaatgtgcgcgatgatgttaagttctccgataactctacgtttgatgcagaagatgtggcctttaccttcaatacagccaaacaaaccgaatcggagttggacctgacaaacattgcaaacgttacggccgtcaacaacacctgcgtgaagtttaacctggtggaggcgcgttccacctttatttacgacttgcgctatctggggatcgtgccgtcggatagctatgacaactctacctatggcgagaatcccattggcactggaccttacgtattggatcattgggataaaggtcaacaagcaatcttcaagatcaacgataattattacggcgataaaccgtactttacccagattaccctgctgttcccggaagaagcgacctggctggaattagccaaatctggtgaaatagacgtcgttccggttgccacctctgccctgaatcagacagtagatggctaccagttcattgagaaatcagcaggccgcgcacagggtgtaagtcttccgtatctgaatgataccggaattatgtacaatggtacgatgaaagttgggaacaatgtgacggcggacaaatcaatccgtgaagcgttaaatgtgggtatcaaccgtcaaaccatgtgcgatgaaatttttgccggccatgcgtcgccggaatttactggtgtggatacacgcacgtatgcaaacccggatgcgaaagtcgcggatggggatgtatcaaaggcaaaacaaatcctcaaagatggcggctggacggatactgatggcgatggaattgtcgagaaaaatgggttgaaagcgtcatttgacttatattatcctcccgattatctggaccgacagtcaatgagcacagtttttgccgaacaggccaaggagctgggtatcgaagtgaagcttgtcggcgcggactgggataccatttacaaaaacctatatagtagcgcagctctcatgcaacagacctctccagacccatacaaatccatttaccagcagtatcacagcaaagaaatggatggcttctatatgaatcctaacctgtataacaattccgcgtcggatcggttaatggacgaagcgatgcatacgagtgacctgaaccaggctgatagcctgtggagccaatcggccctggtgaatggcggcggctggggtcctgctggagacgcgccatgggtatggatcgctaactacgattataactacttcatcaaagacggtattgatatcggtaaacagccggacggtctgggcaacgacgtgctgattaacatatgcgattggagccgtaccaattccacagcg

SEQ ID NO: 77350 - DNA, 204 bp, synthetic construct
  source 1..204: mol_type = other DNA
gatctgtcccctatagatccggtgaacgcgtacctgaaacaggcggcagtgagtgaagcccagcgtcaaatcctgcaggagtattttgggaccaacgtaccactgacgaccaaaatctttcattggttaattgatctcttccaaggtaatctgggcactagccttatctatcgcgctccggttgtcgacattattttggaaaag

SEQ ID NO: 77351 - DNA, 93 bp, synthetic construct
  source 1..93: mol_type = other DNA
gccgtttatctgggctggtttccgatcgggttcggcgtaccaattggtgtgcgcagcaccgatgtcacttttgcggaatgggcaacgcgtttg

SEQ ID NO: 77352 - DNA, 72 bp, synthetic construct
  source 1..72: mol_type = other DNA
gaacaggtctttagctatccgggtattggccagaccgcggttgccgcagggctgcaaaacgatgtgccatta

SEQ ID NO: 77353 - DNA, 114 bp, synthetic construct
  source 1..114: mol_type = other DNA
tttatccgcgatatcccgacgagctttattaatgcgaaccagatgccaagtctggaacatttattcgggaccgattggatgggccgtgacatgttccaacggactattgccggt

SEQ ID NO: 77354 - DNA, 90 bp, synthetic construct
  source 1..90: mol_type = other DNA
accttcctgggctttggtttgccgccgcatgagccagcgattggcgtgatcctgtcggaaagcatgaactatttatccagtgggtactgg

SEQ ID NO: 77355 - DNA, 63 bp, synthetic construct
  source 1..63: mol_type = other DNA
ccgcatattctgccagcgtatggccagtacattatcacgccgatcgtgaccaatattaacagc

SEQ ID NO: 77356 - DNA, 1203 bp, synthetic construct
  source 1..1203: mol_type = other DNA
agcgagaatctgtcgactagcgataacccggttgtagtggataatgtggacatgtcatcgaaaaatatcggcagcattccggacgtcacctcggcgtcaaatgatgtggtagtatccgaaaattcttcggttgaatggaaatcctacgaaaatgaaaaggacgataacgtatcagataatcaaagcaacagttcaagtaactcaactagcaatggtagttataaagaggagtctgtcgtaagtaacgtggtaaccaagaatgttagctccagttacgggacggttgtgaactataacattaaagttcttgatcagtttaaaaaacccatggttggtaagaccgtgtcagtgaccattggtaaaaagactgttgagaaaataactgatagcgatggaatggttacattcaccctcaactgccaggcgggtaaatacgtcatcaaatataaagtcgataatatcaacggctctaattcatatattgttaagaataagatttccctaaccgtccttaactggaacctgaaaggcgacgtgtcgaaaattaatctgattaaaaagaacatgcctaacaacacttgggtgaaaaaagctgtggccgcaacgaaaaaaggtattccgttattaaaatttaagggtggcaaaggcaagatcgtgttcatgacggcgggtgttcatgggaatgaactgtcctcccaagttgccgcaatgaaaatgattaaatatttgtcggacaacccaattagtggaaccgtgtacatcatgccgtttgtgaatgtgaaagcaatcgctaaaaaagtccggtacaccgataaagactataatcgtatcgcttcgagtagcggaacgatacccaacaaaatcgtgaaactggttgtaaaatacaaatgtaactcttacggggatttccacacgacaaaacctggtggcgcgccggggaaagatatcgtcatgggctctaagagcctgaagtccaaaagcgccgacctgaccaactatattgcgaaaaaatgcaaagtcaacaagcgcatttacagccatattggccaggaatatccgggcgcgttgtttgaaaatgtgaacaagaaaggcattacgagcgtgatctgtgaagtcgccctgccacacaatacggtaaccaccaaaacagtcaaaacatcttttaacatgatgaaatatctcctgaaatataatagcgtgatc

SEQ ID NO: 77357 - DNA, 660 bp, synthetic construct
  source 1..660: mol_type = other DNA
gcttacgtgggaaccggttttagtcatgacattccgacaagcaagtatcatgatctctcagcgtcggatattctgaacaaatataacacgacaaattgtcatgtagaagaaaacggtgtctgcacaaaagtggttgacggcgacaccatctatctggacaacgggaagaaaatccgtttcgttggcgtaaacacccccgaacgtggggtggaaggttacattacgtcaaaaaactttgtgcagaaattatgcctgaataaaaaagtcggtctggatatcgatgattcaaagtttactgaccgctatggccgcaccctggccgtcgttattgtagatggcaaaaatgtgaatgaaatgctattgaaggaggggcttgccgaaatcatgtacatgccgcctagtgagtttaatccgtttgagtggggaaccaccaacacccacgtcgataccacccacagctcgtctagcacgacccatacgagtacggaatccacgagctcttcggattctgcgaaatatattggcaacgcaaacactggcaaattccacactgcgggttgtagcagtgttaatcatatgtccgagcacaacaaagtgttcttctccagccggactgatgcaataaatcaaggctacacaccatgtgaaatttgcaatccg

SEQ ID NO: 77358 - DNA, 381 bp, synthetic construct
  source 1..381: mol_type = other DNA
gtgtacgccaataatgatagctccagtaattcaaaccgcaccattttaaacgtgtcttcggaaggcccaatcgagctttctaaaataacggatgacatcaaaaacaattcgtactatgaggggtatgatgttgaaactctgcggtggatggaaagcctgggcgataaatatgtgttcaaaagtaacgatgaaattgtaatcatggacaaatgggatgcagacaaaattccgtccgcgtatgtctgtgatgcttatttccgcgagatctttagctgcaatgtcttggagaaccgtaccctgggtgacggtaaccacttcaaggacgttctctttattaagaatgttgaatttattgatgaagaagtgcattacattcagatc

SEQ ID NO: 77359 - DNA, 36 bp, synthetic construct
  source 1..36: mol_type = other DNA
aaactgtttaacccgagcactattaccacgccagat

SEQ ID NO: 77360 - DNA, 2838 bp, synthetic construct
  source 1..2838: mol_type = other DNA
gaatttaataacgcttcaaacaccgaagactcaaatcttatgactgacaatgtggattccttgagcgttgaaaacaaattagaagtgtcgaacgaggattcgatctcagaggcgaatttagtcaattcgcacgatgataacctgaacaactatagcgacagtgatgtgctgagcaactatgaggacgattatggaaacgtgcaggcgtctaattatgccgaaatcggtaatactaattcggtgcgtagtgatgtgctgtctgtttctaatgacgataatctggcggcgagcagcaaagtatcggcaaaggttgacgtagttgatacccattattccaagtccgcgacatacttcaaagtgaccttgaaagataccaaaggtaactctatcagcaaccagaaaatctcttttaaagttaatggtgtgacttacaccgctaccaccgataaaaatggcattgcaagcgtgaaaacggccgctttgtctgtcggcacctacacggtggccatcaaatacgctggtagctccaaatatgcagctgtcgccctttcaaagaaggtaaaagtactgtcatcggttagtggaagtgacattacgaaatactacggaccggttgtccagtattccgtaaaattctggaaaaactacaacgcactggcaaacaccaaagtaagcttcaaggtgaatgggatcacctacaccaaaaccacggacaaaaatggcgtcgcgaaactccccgtcaatctggcgccgggcaagtacgtgattactaccattaacccatatagcggcgaaaaattgtctaacaaatgcatttccttacgcgatggtaccactctcacccatggtagcacgaacacatacattacgccgaataaaaagcattcctttacggtcaccttaaaaagcaaacacggtatcctgatcaaaaacaaaaacgtagtattcaaatataataacaaaaaagtcacggttaagaccaattcgaacgggaaggcgaccctcagcattcctgccctgtctaaaggtacgtattatattagctacagctactcaggagacaagtactatagcggttcctcgggatcgggcaaattgtatgtaaaaaatccaacgacgaagattacctcttccaaactgaagatgcagtataaggatggcagcaaatttgcggtgaagctaaccaaaaacggtaaagttctggctaacaaaaaggtgaaactgacctttaacggcaaaacgtacacggaaaagaccaattccaagggtatcgcgtatctgactgtccctacagtaaaaccagcgacgtacaacatcaaatatcagtatttaaccccgagttactttaactattgttatggcagcaataaaattgttgtcagcaaacagaccgctaaagtctcagccggggatctggtgatgaactataaagatggctctgtgtacaaagttgtggtaaaaaacaaattcggcaaccctcttaaaaacattaaagtcaaatttaccattaacggaaaaacgtatacaaaaacgactgacagcaatggcgtggcgaagcagagtatcggcctgaatattggttactattctgtgaaaacagtcctttcgaataactattatgcccatggcgccatatataaacatatttcagtgaaaggcaccaaatttgtcggcggcaatatccatgtcgcagtaggtaaaaccgcatattattcagtaaaactgctggattataagaataacccgatcaaaagtacagaagttacgtttatcctcgacggtaaaaaatacaccgcgacaactagtagcaaaggtgtggcgaaagtaaacttaggtgtcctgtcggccggtactcacaatgtgaagtattcacagggagagtacagcggttcctcgaacatatatgttgcggataaagtgacgatcaagcaaattattgctgccagcggcaatgtgcaaaagtatattcagaaaaatcatcgactgccgtccacagttaacatcgggggtgtgacctacagcaccaatcaatacctgtacttagtttcaaaggcgattgtcaatctgaaatcgaacgtgaaatctgccatctatgtgaaaaacgtcgacggccccagtaacccgtccagcacatatgcggcaggtaatctctatgactatctttcagttgcaaacagtgttgtgaaaaactctgattccaaaggtagcgtaccgaatacggtgagttcgaaagttggaacgattgggtataaaagtctggtttatgcgttcgcacgtgttgttgccttttacggcgatgatgatcgcttgccgtcctttgtggaaataaaatcactaagtggtacgagtagcgatagtaatatcaactcgaaaaatacgatttcaaacctgaaagcctatttggcagcatcaaccaactgccaggtcaataatgcgaaaatcaaacaactggttggcaaactgactaacgggctgaagagtgaaaaatcgaaagcaactgccatttacaactatgtgcgtgatacaatttcatatagtttctattacgataccaagcacggggcggtgggcacactcaatgctaaatctggcaattgtgtggaccactcccacttgctggccgctatgtttcgcactgccgggcttgccactcggtacgtgcatgggagctgcaccttcagcagtggcagcacatacgggcatgtttggactcaagtcctgattgataacacctggaccgttgcggacgcaacaagttctcgcaactcgttaggcaaaatagcgaattggaatacgaagtcttaccgtctgaatggctactactccagccttccattc

SEQ ID NO: 77361 - DNA, 84 bp, synthetic construct
  source 1..84: mol_type = other DNA
tatattagcaacattacggaaaagacccagaccaatattcaaaatttgctgaaaactgagcgcgattttctgatcaacaaaatc

SEQ ID NO: 77362 - DNA, 99 bp, synthetic construct
  source 1..99: mol_type = other DNA
atctaccgttcctatatggaaacgagtgatgtgagcttaaaagcgaaagatgacattattgatgtccgcaataccatcctggacaaccggactcatgtt

SEQ ID NO: 77363 - DNA, 78 bp, synthetic construct
  source 1..78: mol_type = other DNA
ccactgtatggcctggcgccgggggcgattgattcctttgctcagttacgcgcagtgatggccggcagtttcggtagc

SEQ ID NO: 77364 - DNA, 96 bp, synthetic construct
  source 1..96: mol_type = other DNA
gggactttcagtatcttgaacggtagcgatggattactggcgggtattattccgaaatttatccagctggccaccggcggcacgtttgacttctcc

SEQ ID NO: 77365 - DNA, 105 bp, synthetic construct
  source 1..105: mol_type = other DNA
cagaaaattggcgtgccgatccttgggcatctgcaaaatggcaaagccgttgatggtattgcgtggttattgagcactccaaacctgaccatgtttatcacggaa

SEQ ID NO: 77366 - DNA, 84 bp, synthetic construct
  source 1..84: mol_type = other DNA
atgtttgatattatgggtatgatctatggcgtgctgaataccattttcgatccgatcttagcgatggacccgaacccaagcaac

SEQ ID NO: 77367 - DNA, 123 bp, synthetic construct
  source 1..123: mol_type = other DNA
agtgccattcacgatttagtaatcatattgccgaccaccgtctattgggttactctgacgccactgtggcatgtgattggcagcatgttttatggtggccaggcgacaattccgtacgggatc

SEQ ID NO: 77368 - DNA, 666 bp, synthetic construct
  source 1..666: mol_type = other DNA
gcagatgatgaccgcagctattcaatcgatcaggtgatcaccgatttgactgtgaaaaataacgggctcctgcatgtggaagaacagtacgattatagttttgatggcgcgtttaatggggtttaccgggacatcccgctaaaatccggcgaaagcatcgagaatattaagatccatgtggatggtgcgtatgccacatatgaagaaagtgatgacgacggctataagcacgtaaaaatttatctgtattcggatgcggcccatacgaagggtataaaagattgcaacgtcaaagtctacatcagctacgatttgattggtgctgtaacgattttcaatgatgtgagtggcctgcagtacaaactttggggtgaagaatgggacgttggagctaacaatcttaaagcgaccgtccacctgcctggaaataacggcaatgagtattatttaaccccctctgagtacaatgatacttcgtctctgaaagggaacacaattacggccgaaagctcatacattccgaaaggcgaatattacgagctgctggttttaatgccggttgatgactttaacaagtccccaaacgcaaaacacgtgaatcaaaatggtcatgacatgattatgaaaaacctgaaaaacaccattaacgaacgtgacttctggaac

SEQ ID NO: 77369 - DNA, 54 bp, synthetic construct
  source 1..54: mol_type = other DNA
attgaaaataaaatcagcatcggccatccgaacattaaaggttttgaggcgagt

SEQ ID NO: 77370 - DNA, 255 bp, synthetic construct
  source 1..255: mol_type = other DNA
tcccaggaaaatattgaaagcaacaccaaagatctcatgcttacgttgaacaacaaggccggcctgagtgcgagtgagcaaatcgtgtttgacactctgaaccatttttcaacaaataatatcttaaatctgtcgacgctgaacggccagctgtctagcgaaaccaatggtaaatggttcatggaaaaaattcgcgaatgggagagctccgttgagaacgatatggatgtctcgcgtttctttgatgaccggggg

SEQ ID NO: 77371 - DNA, 174 bp, synthetic construct
  source 1..174: mol_type = other DNA
gtgccgaacatttccgattatgataatgatggactgttcatgtatcattattacgggggctacggcatgatgaatatggcctttagcaccggtgaaatctcagcaaacccaagcgactcgagtggtttcggtgggagtggcggaggctctgggggcggcggtggcggtgcgttt

SEQ ID NO: 77372 - DNA, 327 bp, synthetic construct
  source 1..327: mol_type = other DNA
tatattccgggccgtgaactggatctgccgattgtgaaaaacgccgaactgattgcgacaaaaatcaaaaaaatactgcaggtgaatgaggatgatgacaccactgtcaatctgattaacggtggccagcagctattggttcaactcccttttgaacgcttaaatgtggccgctgattatagcgtctctacgttacaaacgagtgcagcaaccatccagtccatcatcgacagcttcgagattaacatgtttgatgcgtcgaccatcaagactgcggtaatgggtgcttacccacggaccgttgacctttcagggagcaacattagt

SEQ ID NO: 77373 - DNA, 60 bp, synthetic construct
  source 1..60: mol_type = other DNA
ctgggttatggcttacgcaacattatggccaaccatgttgtggcgatcaccaataaacag

SEQ ID NO: 77374 - DNA, 159 bp, synthetic construct
  source 1..159: mol_type = other DNA
gcactgagtagcattatggagcaaactgccatgtttgaaaccggtgatgctaccggcgcgttcgaacgcatgcatcttttgacgctggcctatcagggattaaacgcgaataacctggtctttgacatcgtgaaagaaaatgggaaaggcacagttggt

SEQ ID NO: 77375 - DNA, 75 bp, synthetic construct
  source 1..75: mol_type = other DNA
gccatcgaagacaaaatcattaaggtggcgaaaaaaatgccgagcggctacaacatgtatgagccaattgattgg

SEQ ID NO: 77376 - DNA, 78 bp, synthetic construct
  source 1..78: mol_type = other DNA
agcaccgttttatactataacgacatgctggaatacgagactggcctgccgggcgtggattatggtcgcacggaaggg

SEQ ID NO: 77377 - DNA, 87 bp, synthetic construct
  source 1..87: mol_type = other DNA
agccacagtatttatggtggtggcggaccaggcacttttcacgggaaccatgtggttacgcgccatgcgaaaggcaccgccatcccg

SEQ ID NO: 77378 - DNA, 135 bp, synthetic construct
  source 1..135: mol_type = other DNA
ctggatgcgggtactcagatgtttagcgtgcaacgtacgagtgccttaatcggcaccgtttatggcaccattgacaacctgcgcaatccgatcccaaacgtcgcaaaaattgctggggaaattaaagataagttg

SEQ ID NO: 77379 - DNA, 870 bp, synthetic construct
  source 1..870: mol_type = other DNA
ctcctgggtggcggcagtgataatgtcaccatcgggtacctaccgtcggaccatgatgcggctctgtttgttgcggatgcacaggggcagtatgccaaaaacggcattaacacgaaacttgtgcaatttaacaatggcggggatctgatgaccgcaatggcgagcggggaagtcgacgtgggttatgtgggcatcactccagttctgtcttcaattgaaaaaggcgtgcccgtcaaagtgatttcagcagcgcagaccgagggttccggaattgtcgttgctaaaaacagcggaattaactctgtattcgacttggagggtaaaaagatagcgacaccgggtgaagcaagcatccaacacatgttgctgcagtattacctgaaacagaatggtatcgatatcaaggacgttaaagtatcggccatgaaagttccttccatgaatgatgcgctgaaaaccaacaatatcgatggcatgattacttttgagccgtacgtatcaattgctgagaaaaacggtgccaaagtcttagtcgactccagcgaaatcctgccgaatcatccatgctgtgttgtggtggcgtctgacaaattccttgatgaacatcctaatgaaacgcagaagatcttagatattcacaaaaacgccacggattatataaacaataacaccgatgaagcggcagaacttctgccgagcgacattgtgagtgatgtggatgtggaaaaacaagccctggccggctttccgttcattagcggattaaatgacacatataagcagaatgtaatggaatttatgaacttggaagttgaactgggcgtactgaagaaacccctctcggaggataaaattttctggaacggtagt

SEQ ID NO: 77380 - DNA, 897 bp, synthetic construct
  source 1..897: mol_type = other DNA
ggtcttttcgactttctgggtgggggcgatgacactgtaaagattggttatctaccttctgatcacgacgcagccttgtttgttgcggatgcgaaaggcatgtataaggacaacaacattacaacagagcttgtccagttcaacaacggtggggacttgatgaccgcgatggctagcggggaagttgatgtgggctatgtgggcattacgcccgtgctgagctcaatcgaaaaaaatgtcccggtcaaggtgatttcgtctgcgcaaaccgaaggttcaggcattgtggtcaccgatgatagcggaatcaaatcgcctgcggatttaaagggaaaaacgattgcaaccccgggtgaagcatctattcagcatgcgctgctggtttactacttaaatcagagcgacctgacggttgacgacctgaatgtttcggccatgaaagtgccgtccatgaacgatgctctgaaaaccggtcaaatcgatggcattgttacttttcaaccgtatgtgtccattgcggccaatcagagtaatgcgcacatcctggaaaactcaagcgagatactgcccaaccatccatgttgcgtggttgtcgcttcggacgattttatcaaaaaccatgaagatcaggccaaaacgattgtaaaaatccacgagaatgccactaaattcatcaatgataacgtgaaagcgggcaacgcagataaaattgtaaaactcctcccggaagacatcgtatccgacgcaaatttggaagcggatagtttagctagtttcccatttattagcggaattgataatgatttcaaagccgatgtggatgagtttcaggccctggaagtcagtatcggcctgcttaataacaccatcccgcaggataagatatactgggaagca

SEQ ID NO: 77381 - DNA, 2550 bp, synthetic construct
  source 1..2550: mol_type = other DNA
gaaaattcgtcagcggacttgatctccgatactcaatacgagaatagcgtggacattgatgtggcggacgataatctgaagtcgtaccaaagcgtctcgtctgacttggaggataacaatgaggtctataaccttaaattaaatgataattcgcaggtggataatacctttttaaaggataacgcgtcggtctctgattcaaagatatataaactgggttacgatgtgacccatgttgcagacaaattgctgaacttctcatcggcggacgacatcctggttattaccaccgccggtatggcgtggattgataacaaaacgactgagagtgccttgggcgggatcgtcgacgcttccaataactacgtcagctacggcaaaggcaacatattgaccctgtcgtccacacgcaacgaccctaccaatattgcattttttatcaaaaaagacaatagcctcaccatggccttttataaaaacggctctctgacgccgattttccatggcaatgccggtccaacactcagcgctggtgaatggaaaaaactccagaaagcgctgggtgatgaagatgcctactcctacattagtatcgcgaatgcgtggtcggccggcatgcctaatgatgtgctgactcaggctacttatcatggccatgtgtgcacgggtctgatcagtgggcaggctatgattcagaccctgctcacgtattatccaccgaaagatgaatttggactccccctagagcatacagcatattatgtgcttggagtgccgggcggctcggaggacgatgcatttacctggtcgctggacatcacgccgggaaaacgtgcgtacataggtattgataccatggtaaacaaagccatgacgggcttcatccgatggaatacaacttccaatacgggcattatcattatcatgagctacaacgaaactgcgataaaagaaagctttaaaaaggtgtcgggtttaaacccggatgcgagtgcaacgaacgacttgaaataccaaaattggctgattagcaccctgcatacaaacccgacctcccttgtcaccatcctgtatgaatttaaaggactgactaaagacaatcttgaatacttgatgggcttggagattggtaagggtaacgtggttaaaagtgctcacggtttggatatgaattatatccttggcctgaacctgactaaagcgaatcgtgaagcgaacgttaacatcgctgaaatcaaattaagcgacgctaaactcaaacagatcggtatcgatgcgtgtaacaatgccattgaatattttagcagccaaggaattaccattagcaaagatctgaataacctgtatgttctgacctctgcgggatatgttcgcattaatggtaccccgacttccatggtattcgatggtatctacgaggtattagggtcagccctatacaaaaaaaccttattcccggttcacacgccgatctggaaagatctggtgtttgatttttattgggtagatcctaataatgtgacaaatgattcgagctttagtctgaagtatgatgtggctaaagacgaactgattgttattggcaacaccacgcggaatgcaaactacattctgcagaatgcgatcaaatatgacccgccatatgatgtactgattggctggctgttccacaatcacgtctgtgggggcagtgcaccagggtatctgattgcggattatatatatgaaaacttccccactaacgaaaatgaaagctacatctacctgaccacgaatgcgaactgcaaggatgatgtgatttcaagagttctgggggtcagccccggtatggggacatattacaacttacgctacgataataacaaaacaaactccaccaacgtaggtatcgcaatcaagtggaatagcaaaaccaaaacgggcgagttaattattattaatcttgataactggggtagcggcgccatcttcaagaaaggctcaaacatgtacgaggaatatatcaaactatacaagaaggattattcctctccgaatttaatttcacgcccgcagatctcaataaccgcacgtaaagaaattaacgaagaaatgctgaacaagatcattgggggcgcaacggacacgaaagaaggaaattctattgcctatatcatgaatctgccagacaaactgccgattaacaacggcgaaaacaacaacaaaaaagacaacaaaaaaacaaaaatcacggggaacaaaaagaagacggacggtaagcacataaacaacagcagcagctcttcaaattctattgattctaatagtcctaccaccggcacgtatggcaaatccaatgccggtctgtccgtcggcatttccaaaaacattatcaatgccaacagcaactctgagagttcagatgaaagttctggtgatggaaagacctatgaaatcagtaaaaaaagtcctaacaaaaaaattaactcaaacaatgccattttcgcaattctcgcagttcttgtgctgggcggtattgttggctatggttacattcgcaaaaatcgtggg

SEQ ID NO: 77382 - DNA, 369 bp, synthetic construct
  source 1..369: mol_type = other DNA
catccgggtcatgggcactatgtggatgagattacctctgaggacgttggccacagtaaccacccttccagcgatagccatgacagttccggcaaagaactgtcgtcaaaaagttcaagcaacagccgcattgcctcttctcatagtaactcgaaatcgaacaaggtcagcagttcggatacctccaattccgatttatcaaataaacacacgagctcgcagagcatcaaaagctcaaaaggtgacgtggaaccaataaactctcaaaatgaggaaatgccgaataatacgcaggtaaagaataccagcaatattactaaccatacaatcacggaagaagcggaaaacaccaacttgctgactcagtcc

SEQ ID NO: 77383 - DNA, 36 bp, synthetic construct
  source 1..36: mol_type = other DNA
ctgccgcagctggcgaacgaatttaatttgaataac

SEQ ID NO: 77384 - DNA, 54 bp, synthetic construct
  source 1..54: mol_type = other DNA
attatgggcaacgtgccaatcattccggaatattttagcctgttaaccaaaagt

SEQ ID NO: 77385 - DNA, 384 bp, synthetic construct
  source 1..384: mol_type = other DNA
actgcaaacatcctcattaatgacaatacgccgctggaaaaccaggcgggcaccttgaaaatcaacaataaaaccatccattacgaaaaatccggtaaatgtctagaagtgattgacggcaacaccataaaagtttacggcatcggtaaagtgcagctgacccaagtgggatcgccaagcagtgaagctaaagactttgtggaaaataattgccttggcaaaacggtctatctggatattgatgataagaaggtagaggatgagtatggtcgcgcgctggccattgtttatacggacactgttgatgtcaataaagaactgattaacaacaacttatctgagatcagctacttcacaccgtcagaatttaagaaaggggatatt

SEQ ID NO: 77386 - DNA, 60 bp, synthetic construct
  source 1..60: mol_type = other DNA
tattacgggggcaacccgacgtatctgtggaaagtgtttatcggtgaaccaagcattacc

SEQ ID NO: 77387 - DNA, 36 bp, synthetic construct; identical to SEQ ID NO: 76856
  source 1..36: mol_type = other DNA

SEQ ID NO: 77388 - DNA, 93 bp, synthetic construct
  source 1..93: mol_type = other DNA
agtttctttaaaggttggggcgccgatccgaacacctattttgcgactaccctgttacagtcgtccgacagcatgaatgggctgttcacgttt

SEQ ID NO: 77389 - DNA, 72 bp, synthetic construct
  source 1..72: mol_type = other DNA
acgttgccaggtagctccattggcttagcggagcttttcaacccggattggagtctgctgacccattttgaa

SEQ ID NO: 77390 - DNA, 111 bp, synthetic construct
  source 1..111: mol_type = other DNA
ttagggtatatgagcctgcaaagtggtacggcagttgcggacttggtgacccagggcaccggccttgtatttattgcctacccgactgtgttcaacgtcctgggtgattgg

SEQ ID NO: 77391 - DNA, 306 bp, synthetic construct
  source 1..306: mol_type = other DNA
gcgattgcatacacgtctatgcatgatgacacgagtgacaacaacaataccaccattaaaagctgcatcccgaatatcacaaatgctacaaatgatgcgccaaacgccaccggcgatgataagaacaccacgtcctccgagccttacgttgtatcggaagtggtgaaatttaatgcccagcagggagaagggtattaccgcgaagtcacttatagtgatggtaacttccgtcagtatgatgttgacactggcaaactgattggtagctcatatgattcggatcaagacaaattaccgagcatggag

SEQ ID NO: 77392 - DNA, 1821 bp, synthetic construct
  source 1..1821: mol_type = other DNA
acggataccaattcgactgatgatgtcatttctagtgacgaggaggcggaacctccctcggtggtatctcaagacatctctataaacgagggaaacgatagcaaccctcaagaaaattatactttgaagggcagcgatgtcagtatgtactataacagcggctctggttatgaagcatccttatctgatggaaatgactctgtggaaaacgcaactattaacctcaacattaatggtgtcgattataacaaaagcacggatgccagtgggaaagtttttctgatcatcaacttaaaaccgggcgattacgtgatcacagcaagctacgggaatctaacgaccgaaaataagattaacgtattgccggttataacgggcaatgatgtgtcaacaacttataaacattcagtcccatatagcgcgacctttcttaaaagtgatgggagcccattatccaacacctacgtcaaatttaaactgaatggcaaaacatactccaagaaaaccaactcgaaaggcatcgcgaaactctatgtcggttcaaaaatcggaacgtacaatatttatgccatgcatccgaatggatacagcatctcaaataaaataacggtaaaaaatagtatcatttcaagcaacctgaaaaaacattaccgcagctcaaaaacgtttaaagccacattttatggtaaaaacggcaaactgctgacgggtaaaaccattaaattctacacgaagggatcgtacttctataaaaaaactaattccaaaggtgtggcgtatatcaaagtgattagtaaaccggggacctataagattacaagtattaacaccaacaccggtgagaagaaatccaatacaattactgtgctgtccaccctggaagcgaaaagcatgaccgtgttcaccggcaccacttcaaaatttaaagtgaaactgtataaaggcgaaaacattgctaaaaacactaaaatgaccgtttatgttgacggtgttaaaaaacgtgtgacgacaaactccaacggtgttgccaccgttaagttcaaattggacaaagggatctataacatcaaatcggtagatccgtttaccggctatgtgctgaataaaaaagtgacggtaaaactggcgtcgatcagtgctattaacgtcaatgcaattgaaggcaaggaagggctgttcccggccaagcttctgcagcagaatggtaaggtggcgagtggcacctacatggagatgacgattgatggggtaaaacacaaagtcaaaaccgatagtcgtggtatcgcaggttataagttcacatttaaggacgcgggtgtgcacacggtagtttgtaaagatctctcgaccggctacaaggtcaccaaaaagattaatgttgtgaaaaagggtgaaggcaaatcgtatgatcagtttggtgtttcagaagatggcaaaaccatgcttgtgattggccggccctctgcgtctggtgaaaccgctaagtacggctacacctattacaaaacggaagtggaccgcacctgcccgatctgcgggagcaatgaactgtactggagcatcttttgggcttccggcaacactgacggcggcacgttcccagagacacctagccgtccggcccattatgacgagggcaatttggatggcatcattatttgcatgcactacactggagacgatgagtattgtgatgccgactggtcggttttcgggcacaatcatgacggtagcggtcgcgatttaaagctggtgagcaaaccggtccgatcctcagaaatagaagcatatctgcttaaaagcggatactatgttaaagta

SEQ ID NO: 77393 - DNA, 45 bp, synthetic construct
  source 1..45: mol_type = other DNA
atgattacccagtttagcaccacttacgcgacgggcctgtataac

SEQ ID NO: 77394 - DNA, 45 bp, synthetic construct
  source 1..45: mol_type = other DNA
tatcagattatcgcaatttatggtgcggagtacatcgaagccggc

SEQ ID NO: 77395 - DNA, 441 bp, synthetic construct
  source 1..441: mol_type = other DNA
gtaagcccggtcttgatcgtggctgaggacgcctctgaggacaatggcattgatatggcggcgacgattgggctgactggctttaactggatttatcccggtaatagtgttaacgctcagggtcaaacactgcacaacgtatatgcggactatcctgataatccatatggcgctgcccgtgacatcatgtcgtatacctaccatgtcaccccgcatatcatcatttccattaacaatgatgcagcagcggccatcttcggtgaaaacatcatcgatgatattcgcgcaaacgatggttacaacggatacgcaggtaatgataaagtttcaggaagtatggatcggggcgacgcggtgggcacggccatggcggaaaatggcattaatataattgaaattccgatccagtttttaatagggaacattagcccgcacttcgtg

SEQ ID NO: 77396 - DNA, 102 bp, synthetic construct
  source 1..102: mol_type = other DNA
cagtttgcctttgcagatttgagtttcgcgggtttaatcggcatcccaaaaacgctgttcatggaagggattggcgtgggtagcctgaccggaactattccg

SEQ ID NO: 77397 - DNA, 42 bp, synthetic construct
  source 1..42: mol_type = other DNA
tggggtgggggctggctgatgaacattggcgcgatcgatttt

SEQ ID NO: 77398 - DNA, 51 bp, synthetic construct
  source 1..51: mol_type = other DNA
gccgcgccaagcattaacggtgtggcagggctgttttatggcaatccggaa

SEQ ID NO: 77399 - DNA, 57 bp, synthetic construct
  source 1..57: mol_type = other DNA
ctggtcagtcagagcatcaatccggcgaacgttggcattggtgtgttggggggcctg

SEQ ID NO: 77400 - DNA, 63 bp, synthetic construct
  source 1..63: mol_type = other DNA
ctgggggctcaggcagtgaccatcggcggcttaggtgccacggcgccgggtctgggcattgga

SEQ ID NO: 77401 - DNA, 36 bp, synthetic construct
  source 1..36: mol_type = other DNA
tataaatacatgctgaacgcgttacacaattttcat

SEQ ID NO: 77402 - DNA, 42 bp, synthetic construct
  source 1..42: mol_type = other DNA
aaattaattgcgaccatcattggtacgggcgatgccctgccg

SEQ ID NO: 77403 - DNA, 36 bp, synthetic construct
  source 1..36: mol_type = other DNA
aaactgccgtcggtgaccggcagctgcagtcatcca

SEQ ID NO: 77404 - DNA, 126 bp, synthetic construct
  source 1..126: mol_type = other DNA
tataacggccatggggaagatgatggatactttggcggtgccgatgacgcggcaggcgaagctattgaggagtccggtttcgaaccgtggtttagctcgatttgggaaccaccgagtggtgaaatc

SEQ ID NO: 77405 - DNA, 66 bp, synthetic construct
  source 1..66: mol_type = other DNA
ggcaaaggggacgttatttatgaaacgggcatcctgggtattgtcgtgactaccgatagctggcat

SEQ ID NO: 77406 - DNA, 51 bp, synthetic construct
  source 1..51: mol_type = other DNA
ccgcatgcgagcactacctttgccaaattgttcggcattacgcgcggtctg

SEQ ID NO: 77407 - DNA, 33 bp, synthetic construct
  source 1..33: mol_type = other DNA
ccgcgcctgtttgcgccagaaagcgtggatgcc

SEQ ID NO: 77408 - DNA, 339 bp, synthetic construct
  source 1..339: mol_type = other DNA
atctataataacactcagccgagccatgaagatagcctgaatttaatcacggacaacggtaccgttcataaaacggcctcgtacccgtataaagcggtcattgagtatgagggcagctggggtgcgaaaatgggagatccaaattatctggtcagtgaagatgggtatggcaccaagtcatttgtgctggactgcgcagcttgggaccgcgtcagtatttctgcacaaaaatacgattacggcgaaggggagttgcacgtgaaacttctccgtaatggcgaagtggtagccgaaaactccactacaaacgtgaccggtgcggttgtagttaactacaat

SEQ ID NO: 77409 - DNA, 786 bp, synthetic construct
  source 1..786: mol_type = other DNA
acagatagcaatgtcgtgatcacctatggggagactacctattcaaatagcaattacaaatcgttcgttgacaatttttttgttaaccaggccaacgttgacataaacaatgtgggcgttaagacaatcacggctgatcaggtgaatcaagtatcaagcggcatcacgggcaaaagctataattcgaaccagatactgtcgagcgcccttgtggatctgaatgataatgggaatttgaaggtaagtgttgataaatccaaaattacgacaattaccggtgacatgtacattagcgcgttaaaatctgcgggtatcaccagtggccatgtgtatgtgaccagtccggtgcaggcaactggtgaatctgctttggcaggaattatgaatagttatgaggaagtcacggatgttcagattccagactctgtaaaagaagcggccaatgatgagatttacacccaagcggaaattgttaataattcgggtgtcaacgcggatgatctgtccaatctggtgaaccaggtgaaagatgaggtctcaggcggcaatgttactaaccatgacgaaattgtcaacatcatcaacagccacgtggaaaacaacaacattaacattaccaacaatgatattgaaaacctggcagattctatcgaacaagtacagaacgtgcaaggtgacgtaaactattacaaaactcaggtcaacgaatttctggacgataactccaccggaggtttctcattagacggcctcttcgactggatcaagtcctttacggatgggatc

SEQ ID NO: 77410 - DNA, 93 bp, synthetic construct
  source 1..93: mol_type = other DNA
ggtgttatttccattctgagttctatcgcgccgtttggctcatccaactcgatcagccaaacgagtaccagcagctatgcccagtcggtggat

SEQ ID NO: 77411 - DNA, 378 bp, synthetic construct
  source 1..378: mol_type = other DNA
agctcccccgatccgatcaaactgggggacatcaaaaacgatgacttggtgattaccgaagtcggtcagaataaactgaattttgaatactccgttgaggtggacatttctgatttatcgagcgaggataaaaagttgttcgaaaaagcgctgaacaataacaatacctcattcatccttaatctgacttcgagcacaccgacgaagattgcaatcacgatgcatagtttaccaaaaaaagctgaaattataggcaataccctgtatattaaaaacaacaatatgtttcgcctgattaacggtatccagctcgataacctaaagatctctgccgtatcattcaacaccactagtggccaactgtttattgcgcgtaaa

SEQ ID NO: 77412 - DNA, 354 bp, synthetic construct
  source 1..354: mol_type = other DNA
gcactgtatcagatcaatgctgaaaattctgtaattgtgggtaatttaagccaaaatatcaccaacgatggttacggctactacaacggttacgtcacgggggacattaaagtagattcgagttttgattatctgtgcgttaatgtgaacttccttgacaacaacggcaaagtcattgattcaactatcggctggaacgatttgaatccgcagagtggcaaaacgtataagatttctgcctggtattttgaacagcaagccccagagaaagcggaaatcagcgtggttgattccgcggactccaccaccccgctgtatactgagaacataacaatttcaacctcgagcggagtg

SEQ ID NO: 77413 - DNA, 339 bp, synthetic construct
  source 1..339: mol_type = other DNA
tgcgtttgtgcatcgatgaccggccagatttcaatcctgccgaacgataatgaatcggagagtatcttggataacctgtctgctattactaatgacacggggaacagcggccagagctacggttcgaaagattatagctcaagcagctccagtagttcgtctaatgatgactcccaagtggaaaccacaaccgaccactccggtgacaaccagggggactcccagaaggattcagatgatcatgaccatgaaaatagcaatcagaacaacaaagataaagatacgaaaactgactctggccacgccggtcaaggcagtggagatgcgaatgattttgat

SEQ ID NO: 77414 - DNA, 51 bp, synthetic construct
  source 1..51: mol_type = other DNA
agctgggcgaacccgctggtgcagacgcatagttatttctactttaatacc

SEQ ID NO: 77415 - DNA, 51 bp, synthetic construct
  source 1..51: mol_type = other DNA
gccaaagattatgttgcgaacaccattccattcgtgccgtttcgcatcagc

SEQ ID NO: 77416 - DNA, 63 bp, synthetic construct
  source 1..63: mol_type = other DNA
ttctatccgaacgccgaaagcatggcgcataaactgtttggcttaatccagattaatgatttt

SEQ ID NO: 77417 - DNA, 42 bp, synthetic construct
  source 1..42: mol_type = other DNA
atggttgaactgaaagacattgcgcaggaaaacgaggtggat

SEQ ID NO: 77418 - DNA, 36 bp, synthetic construct
  source 1..36: mol_type = other DNA
agtaacgcgaaaattcgccagcgtagcgacgatacc

SEQ ID NO: 77419 - DNA, 69 bp, synthetic construct
  source 1..69: mol_type = other DNA
actttcagcattaccccggaacagacgctgaaatttgaggaatattttaacaaattcgcgaatggcgaa

SEQ ID NO: 77420 - DNA, 42 bp, synthetic construct
  source 1..42: mol_type = other DNA
gcacagaaagccattgtggaaccggacgatagctattttgcg

SEQ ID NO: 77421 - DNA, 39 bp, synthetic construct
  source 1..39: mol_type = other DNA
ggcctgagcggcgcgatgttaggtgtggatgccgggggt

SEQ ID NO: 77422 - DNA, 87 bp, synthetic construct
  source 1..87: mol_type = other DNA
aaatttattgatgcggttatcaaatatagcaagttatacccgtcggcaagtaacgtgttccatctgtcccagctgccagccaatgac

SEQ ID NO: 77423 - DNA, 102 bp, synthetic construct
  source 1..102: mol_type = other DNA
catcctatctttttgctaggtgagctgatgaatattaatgttgaattattttaccttttcaaccacgcttttcaaaacccattctttgattatataatgccc

SEQ ID NO: 77424 - DNA, 87 bp, synthetic construct
  source 1..87: mol_type = other DNA
atccacgagccacgcccgttcttaagtctggacaacgtgcatctgttgattgcggaagatgatccgctttcctttcctagcggccat

SEQ ID NO: 77425 - DNA, 33 bp, synthetic construct; identical to SEQ ID NO: 76894
  source 1..33: mol_type = other DNA

SEQ ID NO: 77426 - DNA, 57 bp, synthetic construct
  source 1..57: mol_type = other DNA
ttgatcggtattctgtttggccaaattgaagttgatgtgtggcagaacgcggacaaa

SEQ ID NO: 77427 - DNA, 33 bp, synthetic construct; identical to SEQ ID NO: 76896
  source 1..33: mol_type = other DNA

SEQ ID NO: 77428 - DNA, 51 bp, synthetic construct
  source 1..51: mol_type = other DNA
ttgaacatttataatctgagcgcgaaaaccgcagccatgacgagtgaaatg

SEQ ID NO: 77429 - DNA, 48 bp, synthetic construct
  source 1..48: mol_type = other DNA
ctgaacatcaactttctgaatattttcccgcagttgagcgtgtatcca

SEQ ID NO: 77430 - DNA, 36 bp, synthetic construct
  source 1..36: mol_type = other DNA
atgatgctgatcattaaaaacatctttttggtgatt

SEQ ID NO: 77431 - DNA, 339 bp, synthetic construct
  source 1..339: mol_type = other DNA
ccgctggctgaaaactcaattcgtaacactctcgacgtttccgattctttgaatgtgaaaagcgatctgagtaaaatcgcgaatgccatcaagcaggtttacggggaaggccagggtagccgccaaacgattaaaattgaaagtaacaagaaacttaaaattaatatagcaaacagccacgtaagcacatcgtttaaactgaaaagtaattccaaaaaggatattaaagagcatgtcatgtcgaacatcggcaagaccaccatctcattaaataaaggtgaaaacgtgatcattgtggagtggccagtcaattctaaaaacatgctgatttatacggta

SEQ ID NO: 77432 - DNA, 519 bp, synthetic construct
  source 1..519: mol_type = other DNA
cttgatccgatttatgatgaattaccaaacgttgcaagtgtgattgaaaagaatatgcctaataacgaagaaacactgtacctggatttaagctcttccattaatatcgatgacttgaagaataacctgagcgcaacggatggcttcatctcatttgatgaaaaatcggtgaatattcccatgtggacattcaacgagcgcgaacataactacttcgatgaaatagtaggtaacattgactcgaactataaagcgtacaatataagtacttcggagattcagatcaccctggcggacaattatacttcagctcaggccctgaaatcctttagcgattggtataaattggtctatggtgagaccatctcttacgcgcaagttcacgccgtcctagttgtggacagctcctctctggatacgtttgagcatattctgcttcaaaaaggcattgtggctagtaaaatcgaagggccgatccaggacacggtaaacaataccaactcaagcatgctcaccaac

SEQ ID NO: 77433 - DNA, 36 bp, synthetic construct; identical to SEQ ID NO: 76902
  source 1..36: mol_type = other DNA

SEQ ID NO: 77434 - DNA, 636 bp, synthetic construct
  source 1..636: mol_type = other DNA
atcgtgagttccatgatgaacacgccagataacgtgtataacatcacaaatgtcgggcacaatgccaacggtactgtttataaaattgaggccggcaatatgtcttctaacgagaccgtaggtctgatcctaggagtccatccgcgcgaacatgaaatccacgaggcggtgaataatacaatttataatatcacgtcggaaaatggcacgaataatcttactaaaaagtatgtaatctactatattaaaaccaaagataatctgaccagccgtgaagatacgcggcctgctggtgaggaattagcgaacaaattcattgttccgaatattgtgaaggataagcccttcattgtattggatgtgcacgagataaacccagactacgaatactcaaactttatattttccctgtccaaccgcaccaacaccgtcgactcgtacatcagccatattgcgaacgacgtcaacctggtggattatcagtttagcgaaggcacaagcccggaaaaagttaccaaaccgatcgcaagtaaaggcgttacgaccttgctgatggaaacctcaattactgatgctttaatggaaaaacaaaaaacggcagacaacctcattaaaagtctggatagcctggaaccg

SEQ ID NO: 77435 - DNA, 594 bp, synthetic construct
  source 1..594: mol_type = other DNA
accggtttcattggcggcaatgacgtcgaaactacaccatttaaaatgtcgtttatggagggcagtttcataggtaacgtgagcttagaaaacgataaagagaagttcatgcactcgtacgaggacaaagaaaataaaatcacgtataacatttccactgtggacaacagctccgtactgatggaaatctaccaaattcagggtctggggaatcctgaagttcgctcattcaatggcaatgaatggaatatctactttacacaggcggtgcccaacaataatagcagcaccaactcgtctaatggggatgacgcaatgaacattatcatcggcgaatcacagggtaaaaaacaaggttatctgatttatatgattattgatggcaaaagtaagatcaacgccaccggtaaaatgtacggcgaggcgtataccaactactttgagccgctcctggaaagcttaacgctgaaagaaagtaagaacgttccgcatatttatgatgaatttggactaaccaaagaacagtttgattatcagatcgatttgatacgtcagtataaatccgggaacacgtctgcccttcagggagctcaa

SEQ ID NO: 77436 - DNA, 1101 bp, synthetic construct
  source 1..1101: mol_type = other DNA
gcaaccaacgcgccctataccgcgcagtccgtcgcggatgagtataatcttcctatcggccaatccatgtttgaaaaccaatctattctcggccagcaggattccatctctgtaccactaatcagtaatgtgggattcctgcagcaccagatcaccgccttagacattcagggactgctgatgacgttgactaccgggatggttccctttgacttttccaccgtctcgagtgagggtatagactcatacggggatgtggttaatgtcgaaggcccgggctttttaacatttgaaggcgataaattggctgtaaaatcaccgaataactatgtatgggggtacagtaccccgtacaaatggctggtgaaaacggatacgggtgtggatgttgtggagaatggcacggttgtgaaatcggtgccagaaaacgaaattaagaatctggattatcataacgattactataacagctcgactattcgtagttggtataactatgatgcccacaatgggtctacatttacccttgaaaagggcatgaaggggttttcggacggccgcaacaatattagcgctgcggatgtgccggtcatattcggccatgacgttgtggactatgcatctgaatatccgactggtagcccgattctgctgtactcgggaaattacactgaagaagatggtgaggcttatggaacgagcttaggcagccacgcagaatacggtgatagcatccgcgaggtgaacgcacggcaattcgttgatgcctggaatggaaccgtaattccacccaattcaacgtcaagcggtaaagactatgtgtacttcgaaagcgcggttgatccaactgcgcctggcggcagtgccgcgcatggtgtctgcccgccggcgcgtgctctccgtgccgcagtcaccgcggaaggtttcggcctgccggttggtatgacgtgggacgaagacgccgtgctgtttgggtataaccctgcccaggatatcacagttacaaacaaccatgattatccggtcctgatcaaaatgtggaccgaaggtgagggtaccggcatgggtatttactgtcaaattgtacgctacatcccgaaa

SEQ ID NO: 77437 - DNA, 39 bp, synthetic construct
  source 1..39: mol_type = other DNA
gtgctgttcagtagccaggcggaatttacccatccgttt

SEQ ID NO: 77438 - DNA, 297 bp, synthetic construct
  source 1..297: mol_type = other DNA
cgtgtcagcggcatgaccattttctccccacttttacggctgggtcgcatcgagcagtactctctatcaagtattaaaatggtactgaacaacatacagctgatcgggcataatgcgaatgcgtcgtattggggcgcagatggcaccgcctttgctgaaggttacattacgttgccgatgcaattgatcttattttttgggctgcctttcccgctcttctttggtgtgctggttaaccagaaagatactattgattatatgctgcccggtatctttggctggggcttcgactttgga

SEQ ID NO: 77439 - DNA, 33 bp, synthetic construct
  source 1..33: mol_type = other DNA
tttccaacgaacatggattatctgaccagcccg

SEQ ID NO: 77440 - DNA, 60 bp, synthetic construct
  source 1..60: mol_type = other DNA
tttattggtttcacctatgataacctggttcaagcgagcgtgcaggtcggctttccgtgg

SEQ ID NO: 77441 - DNA, 36 bp, synthetic construct
  source 1..36: mol_type = other DNA
gcgtttaacttcagccatgtgttttatattgaaagt

SEQ ID NO: 77442 - DNA, 315 bp, synthetic construct
  source 1..315: mol_type = other DNA
ttttactcctcatcactcattaacagtagtattaacattgaggacagcgtgagccatcgcatcatcctgaatgacgtgtcgtgcgtaatcagccaggttaattccaacggcgtcggttatagtaaatacattaaactgccgtcggataagggttacttcgaaattaccgttgataagtccaaactgaccatcgaatatgataacaagaaaggcgaaacgatgctgccacttttgaatatggattctaaatataaattaatcagcgggcgtggatattatattagcaaatctgatgacggcaaaattgtgataact

SEQ ID NO: 77443 - DNA, 414 bp, synthetic construct
  source 1..414: mol_type = other DNA
gtgttcatttcggacgaaaacgaactgaatattgccatggcagcggcgcacagcggtgtcatcgaaggtcttgcgacatcatcaagcggaatttatccggccgacgcttacagtgattatagtaattctaagatgaacgtcctggaaccttactctgtggagatcgtaaatattagctataccgagttgggcggcgataataactacgataaaaaacaaatccagtttaaagtttacgcaaaaacgtcggaccgtttcaataataaggaattaacttccattggggatcggataaattataacctccgcaaatccattgctgttagttttaactccatcaacgccaccaataaactgtataacccagtgtttagcccgcattatgtgtacacgaccgcgaacgttaaatgggta

SEQ ID NO: 77444 - DNA, 2658 bp, synthetic construct
  source 1..2658: mol_type = other DNA
gaaaattcgacagacatcaacttagaactcaaccataacaacgatgagtgcattaaggaaatctctgatgagagctcaacagacattgatctcaaaatcaactacgaatatggggatgagatcaatccggaaatctccatatcgcactgcaataataatatgaactatacaaaaaatatcatccacagcaacaattaccgcatcaccatgaataaattgaatgacggagccgaatgcagcgtgagcgtgtcagctctagggtacatcacgcagattcagaatatcaccataaactcccagagcaacaaaacgaccatctttaatctaaaggcgacggatatttacaaaatgggctatgatatgaccaaatcggcagatcgtctgcttaacttctcatcggctgacgatgttctggttattaccacggcgggcatgacccgcatcaatgacattacgacagaaaacgcattggacggcatctacaatgcggcggatggccatatcacgtatggtaagggtaatcttctgacactgcatgccatccgcaccgatccgaccaattttgcctttttcattaaaaaaggaaaccgtttgacaatggcattctaccaaaatgcgtcgacaacgccggtatataccggcattggaggtgttggcttaacgaccaaccagtggaaaaaactgaaaggcctcataggtgccgatgatgcctacacgtatgtaagtattgccaacgcctggaacgcggggctgtatagcgacattctgaccctggcttcgtaccacggccacgtatgcactgggttaattagtggtcaggctatggtgactaccttaattaaatattacccgcctcgtggtgaaaccggcgcccagcctcttgagaacacggcgtattatgtgctgggagtgccgggtggttctgatgacgatgcatttacatggacccttgatatcacgcagggcaaaatgtcatacattgggtttgacaccatggagaacaaaaatatgaacgggttcattcgatggaatagctcaagcaacaccggccttctcattataatgtcgtatgacgaggcaaaaataaagaacacatttaaaagtttatatccgaatattaatccagacaacagcgtgactgaagatctgatatatcaaaattggctgatttcaactctgatgagcaaccctgaaagcctggtcaccattgaagcagcgtataaagaccttaccttggaacaaaaaaaccagctgatcggcaaccaattatggagcgcgtcgaacattacggcgcggggattggatctggattacattaacagcctgaacttgcccgatgcggaaatggaaacgggcatcttcaataacgtccatctgtcggactcacagctcaaacagattggtgttgatgcgtctctgaaagccgtcgactactttaaaaacatcaacgtgactatcgaaaaagacatgtctaacttttacgttttgacgggtgcgggatttgtacgtattaacgatactgcaacctcaatggtgttcgacggtattgaagacatctttggggctcgcttaagtaggggtaatctactgccagttcatacggcactgtggaaagatctgataattgaattttattggttgaatacctctgatatctataattcagttacgtatagtctcaagtacaattcaaccactggtcaactgtatgaatgtagccagcaatacaacattcaggatcgtagtttacggtacgaccctccgtacgacgctctgatgggctggctcttccataaccacgtttgtactggtagttctcccggcgtcttgctggcggataaaatttttgacgatctgccgttaggtgagaatgaaagctatgtgttggtgagcacgtacacctattgtaaggatgacatgctgtcccgcctgcttggcgtgtctccgggtatgggtaactattataacctggcttattccaatagcgatgtcaatgcaggagcactgtggactgctgatagcgatatcatcatccgctggaacagtgagaccaacaccggcaccgcgacaatcattaagtttggttatccgatctttaaagatggggccgatgagtatgcggagtggatgcgctttgtcaaaggcgattattcttctgagaatattgtctcgctgcccactctgagtttcgaagttactaaaccaattaccagagatgattataacaagattatttccggcaaatccgatgatgaaggaattaatgtactgagctatattcgtgcgctgccagataaaattcctgcggtgctcatcgataacaatggcatttctaacggcaatgacgggaactccattaataaatacccaaagaaatcgaataacaacagtgccaacaccaatagtattttctcatcttcaaataattataattccccgagcaagggcctgaacccgaatgtaggggtttcgtcctactcgcttagcggcgatagtgatgtggaagacaaaggtgaagcaagcagtaatggcaaatcctacgaagtctccaagacgccggccaccaaatccatcgactctaacagcctgatctacgccctggtgggtgtgctggccattggtattttaatcggtctgggcttcatgaaacgtcgaaaa

SEQ ID NO: 77445 - DNA, 69 bp, synthetic construct
  source 1..69: mol_type = other DNA
atgccgggcgtgctggaaagcaaaaccctgatgaactttttacagatcaaagagatgttgtatcatatt

SEQ ID NO: 77446 - DNA, 3969 bp, synthetic construct
  source 1..3969: mol_type = other DNA
gaagagagcatggataataccacctcaaacgatgatgtgctaacttcagactcacacgacgatgttctgactctgaacagcaacgatgatattttgacctctagtgaaaaaacatggtacgtgggaaaaaacacgacggtgggcgggagcggaacacaggaagacccatttaacaacattgaattggctctcaaccattcgagcagcaatgacaccatatatattaacccgggtgtgtatgatgggccgcataacaccaacctcaaaattgacattgataatctaaccattaaagcaaaaccgaactccgtactgctgaatgccaacattaacaatacacgcgtgtttgaggtgactgggaatgacgtgtcaattagcggtctgaacttctccaatgtgtatatggaatatggtggcgtgattaaatgggatggcaatggaggcagcctgaccgattccaccattaaaaattccaagtcccgtgttgggtctatccgttgggaaggcaataatgcaataattaataacatcactattctcaattcgacgtccgaaaatggtatccttgtcatatcaggtacttcgtccaatatcacaaattccacgattcgcgataccaaagggtattacggtgcagttatgtttggtggcaaattcaatatcatcgataactgcacgtttatcaacaacacggcctggatgaacggcggtggagtgtatgattggggtgccaacaacacggtaagtaactcgctgtttatcgcgaacaacggaactcgtggtggagccattctgacctatgaaaatcagcccaatcgcatgaacatcatcaacaatacgtttatcaacaatatcgggggacaagcaggcgcgattgtagtacgccgggcaggtgcaaacattgataactgtacgtttatcaataactcagccggctctgcgggagcggtcctgatcctgtcggaagccaatatcaccaattccatttttgagaacaacagtgcgagcacggttgggggcgcggtatatattacaggcgatggttccaccattgataactcaatatttatcaacaataccgccaacaacgatggcggcgcaatctactggagtggtgaaaacggtactgttaccaacacaattttcatcaataacacagtaaataatgggaccggtgaagccattggttatattaacaacgtgactctgaacaacgtgaccttggtaaataataatattgaacaagtaattgtgaacgaatcaacacccacctttgaatatgtgtttaaacttaccgaaggatacagcaacgtcaagttaaccgataactacaccgccttttgtactgaaaagacgaaatggagctcgtcgcctcgtactccattaatcccgcataacgatctgtccatattaaaaaatcacatcacgggcgaaagcgtagcggagtatttgaaaatcctgatttacaaatatctgaaagatcccgaccgtatcaggaatttacaacaaaaaatctggatattcactgatgacaactatattgatagcactgattctataatcaaagaggtgatttctgattataattctggtttccgtattcctaaccagggcttttcggaaattataaatgataccaccgtacttcgcattgatttcaaatcatataatattactaaacaaatccagaacatgatcggctttaaaagcagtatcgaaaacattacgtacaacatgagtgttgttaaaaatacactgacgccagctgttatcttagggaatcagaccacttttgaaatcaaagtgaccaataccgggagttactacctgaccaatgtcagtgtgattgaagatggctatgacggtctgatctacaacagcttttcagatccgagcggcaaatggatcttttcacggaacagtgatggcaaaccgatgtggacatataacgggactctgtacgtcggcatttcatatagtttcaacgtaaccttcaatacaacaaaaaccggtaatttcaccaattttgtagtcgtcacctcgaatgaaaccgacaacaaaaccaccaacaacactaccaaggtctataagccggatatgacggtggagaagctgtctctgaaccgaacggtttacgttggtaaccagacggtctttacgattgtggtccgtaacacgggtgactgtgatttaggcgacgtctttgtggtggaaaaagcgccagaaggcctggtttacaactcgtttaaaggcaccgactggtcgtacaacaatggcaaatttacttatggcaaagtgctgaaagtcaatgagtctgtgagttttgagattgtattcgatgctgttagtccggggaattggaccaatgtagtagtggcaggctccaatgaaaccgacaacaaaaccggtaataacactaccaaagtttacaagccggacatgactgttgaaaagctttcgttgaaccgcactgtgtatgttggcaaccagaccgtcttcacgattgtggttcgcaatactggcgattgcgatctcggggaggttttcgttgtcgaaaaagcgccggaaggacttgtttacaacagctttaaaggcacagactggagctatgacggcaataaattcatgtatggtaaaaccttgaaggtgggtgagtctgctagctttgacatcgtatttgataccatcagtcctggcaattggaccaatgttgtcgttgcaggttcgaatgtaaccgataacaaaacaggcaataatacgaccaaagtgtataagccggatatgacggtcgagaagctgtctctgaatcggaccgtttatgttggtaaccagacggtctttaccattgtggtccgtaacaccggcgattgcgatttaggcgaagtcttcattgtggaaaaagctccagaaggactggtttacaacagctttaaaggcacagactggagctatgatggcaataaattcacatacgcgaaggtcctgaaagtcaacgaatctgttagttttgagattgtattcgatgctgtgagcccaggtaattggacgaatgtggttgtggcgggttccaacgaaacggacaacaaaacaggcaataatactaccaaagtgtataagccggatatgaccgttgagaagctttcgttgaatcgtacggtttacgtgggtaatcagacggtctttactattgttgtgcgcaataccggcgattgcgacctgggcgaggtgttcattgtagaaaaagcgcccgaaggactggtgtacaacagctttaaaggcacagactggtcctatgacggcaataaattcacatacgctaaggtcctgaaagtcaacgagtcggttagttttgagattgtattcgacgcggttagccctggcaattggactaatgtggtggtggcgggtagcaatttaacaggtaataagaccggcaataatacaaccaaggtgtacaatccgggcttgaaggtcgaaaaaatcaccttggacccggtggtgtctgtgggtgagatcacctcttttgagattgttgtccgtaataccggggattgtaaactgggggatgtgtttgtccatgaagatagctatgaaggtctgcgcttccatagtttccgaggtgatatgtggaaacagaaaggtgacacgttctattaccagggggttctgaacccgggtgagtcagtgagcttcgtaattctgtttaccaccctaaaacctggaaacttcacgaacattgtgacggcgggttccaatgtgacgaacaacacgacgacggaaaacaaaaccaaagtaatcgaaaaccacacgaacaacaatactaatgggacgaacaaaacagtgaacaatgaaaccaaagaggtcaatgttcacaaggttgacacgtcacgcgccacggggaacccgctgctcgccttactcatggttcttctcatgatcagcgtgacgtctgtcagaaaattcaaaaaa

SEQ ID NO: 77447 - DNA, 720 bp, synthetic construct
  source 1..720: mol_type = other DNA
gcatattccctgtttacgcaaaaccaggtccaatatcagaccatcgcggttagcaacgcaaccacgatggaagtgccggtgtcgaaaaattcaacctttttcaatgacgcgctggggatcaaatactatcaggatgacaaaagcggcgttcaggtgattagctggaacggccaggaacaggcctcggctaaaggggccgtgaacattgcctctcaatttgaaaagcagaaggcaggaactacacagtcaattgaaaacggcgtgcctgtttatgaaaataaaaaactgcgttgcttcatcattgaggtaaaaaatgcgaccacaaatgacaacattataatcgttgcaaaagataagaacgtggctttgcacatgcttaaaagcatcaaattcggcgtaagcaacattacgaacgccgctcaagtcgagccgtatgcggaatctggtggtaaccatttaaatgacaataatgacactgtctttgtcttttatccatggtacgtatacgatgaaggtgattatgatgcgtatgatgactattcttcccgcgattcagaatacgcggatgacagttactatgactattcttcaagtgatagtgagtatgccgatgatagttattatgactactcgtcgagcgattccgaatacgcggatgacagttacgatgaggaatacgatgagagcgatgaagattacgaaagctccgaggatttcaat

SEQ ID NO: 77448 - DNA, 273 bp, synthetic construct
  source 1..273: mol_type = other DNA
gctattgactctgcgaattggactagtgctgatgtaggttacgaaacgtttaaaatacctccacaatatgaaaatccatactccagcgactttgacatgtacgaatttgatgaagatattgatgtttttacaatcagatatgtaaaccccaatctaatggatttatatggtcatttcttgaatgagtaccatggaaaaaaggttaatgttgcaggccacgatgccgtccacttcacttattatgataggcatgacaagaccaacaactcagtg

SEQ ID NO: 77449 - DNA, 147 bp, synthetic construct
  source 1..147: mol_type = other DNA
tggttctctgcgggtgaggaattttattatatcaattggattggcagcaacattaccccggccatcaaagaagttgtgaaatcgtccctgaaatcaaactacacgcataaggaattttacagtatattaaatgataacatcaaaatt

SEQ ID NO: 77450 - DNA, 270 bp, synthetic construct
  source 1..270: mol_type = other DNA
gcgtatacaatgtttaacggcaatactcatttaaacgttaccgacaacaccactggaatcgacaatagcaccggcatcgataataatacgacggttgtcggggataactcgccactggagaatctgaccaacaataacacaacgtataaagtatacaatccgcaaagtgattcctatgtcccggtgattggtgaaaaattcgatgaagaagtgaaccgttggtatacgtacgatgaccagggtgtgcgctactataatacccggattaac

SEQ ID NO: 77451 - DNA, 36 bp, synthetic construct
  source 1..36: mol_type = other DNA
ccaaaaattctgaacccggatgcgaccagctatacg

SEQ ID NO: 77452 - DNA, 75 bp, synthetic construct
  source 1..75: mol_type = other DNA
aagaatatttctacttcattgaataagacacaaaataaaacgttaataaacaacgaaacttataaaaaaacaacc

SEQ ID NO: 77453 - DNA, 60 bp, synthetic construct
  source 1..60: mol_type = other DNA
aacgtgcagggcgccactagttacatcaaagtcattaaaagcaccacgaaggtttatgcg

SEQ ID NO: 77454 - DNA, 51 bp, synthetic construct
  source 1..51: mol_type = other DNA
agcaaatataacatttacagtatcaaaactaattcgaagggcctggcgacc

SEQ ID NO: 77455 - DNA, 51 bp, synthetic construct
  source 1..51: mol_type = other DNA
agcaaaatcttaattaaaaaaaccattccgaagaaaatcgaaacgctgact

SEQ ID NO: 77456 - DNA, 162 bp, synthetic construct
  source 1..162: mol_type = other DNA
acgattaagcttactgacgattataatgatatcgtaaagaaagttagtattaaagtcaacatttacaccggtaaaaaattcaaaacgtttaaaatcaccacaaataataacggggtggcgaaattgaaaaccgataagctgagcttaggcactcataacctg

SEQ ID NO: 77457 - DNA, 207 bp, synthetic construct
  source 1..207: mol_type = other DNA
ataaccctggtaaaaacgattattcatgatgatattaagacgctggtgcttaaaaacatcacttactaccaaaccaaagacggcaaatttaatgcgaaattaggttggtattcgaaagttgggagttcatatcagatcttgcgcaagaccaatgaaaattataacatcatttctactgtcaaaagcaacagctcctttaccacattc

SEQ ID NO: 77458 - DNA, 120 bp, synthetic construct
  source 1..120: mol_type = other DNA
aacctgaaagcggagattacctggaacaaagtggaaggtgccacgaagtatattatatttcgtaaaatcgggcgcgatgctaatttcaaagcaatcggcattgttaacagcaatgtctta

SEQ ID NO: 77459 - DNA, 45 bp, synthetic construct
  source 1..45: mol_type = other DNA
ccgaaacagctgcgcagtattttaaacagcaatacctttgtggat

SEQ ID NO: 77460 - DNA, 48 bp, synthetic construct
  source 1..48: mol_type = other DNA
agcctgaaggacaatgaaattaaatggggcaaagtgccgaacgcggat

SEQ ID NO: 77461 - DNA, 36 bp, synthetic construct
  source 1..36: mol_type = other DNA
accatcacgttgaaactgaacaatattgaaaacagc

SEQ ID NO: 77462 - DNA, 282 bp, synthetic construct
  source 1..282: mol_type = other DNA
agtccgtacaaatcaaatagcaacaaacacatcttttctatcccctatcgggtgggcgaacttttgggctgcgtctactataacccgagcatcccaggttccacttatcatgatttagggcagaaagatggaaagaacattgagaataccaaatactatcgctaccgtatttgtcgcgaggttgtagaccaaatctcgattggcgaactgcctggtaactggaaggaactggataatctgaaaaatagtgaaggtataaccaacacgtatattgatgactat

SEQ ID NO: 77463 - DNA, 303 bp, synthetic construct
  source 1..303: mol_type = other DNA
taccttgataattccatcctcggcagtataaattctgttgacacgcataccttcaacggtgctctgaatcacattctgaacaaaatcgaaactgcgagcaaaacgcgtgtggagcgcggcgaatcgccgattaaagtcatctttgtagatctgtgctactcagaccgcgcatatgataaaacaattaaggaaaaccgggacgtgaccaaaaacaaaattgggctaactttgaatgattatcaaaatgccctgaacaagcagtacaataaatggaaaaataacaactttctgaccttatataac

SEQ ID NO: 77464 - DNA, 60 bp, synthetic construct
  source 1..60: mol_type = other DNA
aaaactcgcgattataatattgtgaatcaggaaaactgcccgtacacgaccagcgacaac

SEQ ID NO: 77465 - DNA, 54 bp, synthetic construct
  source 1..54: mol_type = other DNA
agcaaattcacctatggccagtacggtaacgcgtttgccagttttctgaaagaa

SEQ ID NO: 77466 - DNA, 321 bp, synthetic construct
  source 1..321: mol_type = other DNA
gcatacatcagtctgaacacccaggaaactaaagttgacatcattacgcagaacacgatacacaacggtgacattattaccgtccagctaaaagatctgtatcgcaacggaatcccgaatcaggctattgatttgaaaattctggatgacagcggctgggcccacaactacaacgcaaccacagatgaactgggtatcggtcaaattcaaatcctcggccttgaaaatggcaattatactgcgcatgccaaattcaatgggaccctgtttttaaaggagtcggcgaatcatgtatccttcgaggtgacggatggctatttt

SEQ ID NO: 77467 - DNA, 60 bp, synthetic construct
  source 1..60: mol_type = other DNA
tttgaaggccaggttgcgaccgtggccaatttcattaaaatgtatttcgatagcaacttt

SEQ ID NO: 77468 - DNA, 54 bp, synthetic construct
  source 1..54: mol_type = other DNA
tacaccattacgatgtgcatcctgaaaaacaagctgttatactataaatatgaa

SEQ ID NO: 77469 - DNA, 39 bp, synthetic construct
  source 1..39: mol_type = other DNA
ctgaaatatgaatacaaaattttattcacctttaacccg

SEQ ID NO: 77470 - DNA, 744 bp, synthetic construct
  source 1..744: mol_type = other DNA
ggtctgtttgactttatgggaggcagtgatagctcaaatgatgataatactttcgtcgttgggtttgatgcagaatttccgccctatggctacaaagacgatagtggcaactacacggggttcgacctggatctagcaaaagaggtgtgtgaacgcaacaactggacattcaaggcccagccaattgactgggatgcgaaagatgtcgaactcgatagcggttcgattgactgcatctggaatggctttacgatggatggccgtgaagacaactatacgtggtctaatccttattttgacaataagcagataattgttgtgaaatccaactcgggtatcaataccccggcggatttgaaaggtaaaatagttgaaacacagaaagattcctcagctctggccgcgcttcagggcgataacaaaactctggcggacacctttggaaccctgacggaagtggcggattacaatacggccttcatggatttagagagtggtgcttgcgatgcaattgcgatggatattggtgtagcagaatacgatattaaaaataaaaacgcgaccagcgattatcaaatcttgaaagaatcgattaccagcgagaaatatggcattggcttcaagcagggaaacactgatctgaaagacaaagtacaaagcaccttagacgacatgtttaaggatggtaccgtggctaaaatcgcccaaaagtatgggatctctgaggacgccctgatccagccg

SEQ ID NO: 77471 - DNA, 36 bp, synthetic construct
  source 1..36: mol_type = other DNA
atgatcctgagcaacgtgattggtcagttgctgggc

SEQ ID NO: 77472 - DNA, 33 bp, synthetic construct
  source 1..33: mol_type = other DNA
gtgtttggcatgagcctgagtgcggattatcgc

SEQ ID NO: 77473 - DNA, 57 bp, synthetic construct
  source 1..57: mol_type = other DNA
atcgccattccggaaatgtttaccgtggctaaacagattgcggcggcagatgccagc

SEQ ID NO: 77474 - DNA, 42 bp, synthetic construct
  source 1..42: mol_type = other DNA
ttattcaactttaatgttggcaacctggtgccgctgaccgat

SEQ ID NO: 77475 - DNA, 33 bp, synthetic construct
  source 1..33: mol_type = other DNA
gtggcgggcttaggtgccgatgctctggcggca

SEQ ID NO: 77476 - DNA, 57 bp, synthetic construct
  source 1..57: mol_type = other DNA
gtgccgattctgcagtttatgggcgccggtgataccatccaatatgcgatggactac

SEQ ID NO: 77477 - DNA, 36 bp, synthetic construct
  source 1..36: mol_type = other DNA
gttctggcggctggcacgaccgccgtggcagtctat

SEQ ID NO: 77478 - DNA, 63 bp, synthetic construct
  source 1..63: mol_type = other DNA
ccgattgcgacgattttttcgtatactgctgccagtgcaagcctgtccccacagatcgcgacc

SEQ ID NO: 77479 - DNA, 447 bp, synthetic construct
  source 1..447: mol_type = other DNA
tacatcggcttcgggaaccacaatgatgatgggcaaacccaggtgcaaaataatgcctcctccagtccgaatcccgtgcagtcaactcaatcgagccagcctcagcagtcgtcttcagcacagagcgcggcgatggatattctgggtggttcgttttcaacgggcagcagcctgtctgcaaaaacctatgccagcatctatgttggttcgcagcattccggtgaaaaagtcattatacaaattaagtatagccgcgacggatctagtctgaacaacggcaatatggtcccaaaaaccgtggactcttccggctacattaatgtaaaaagtgctgattccttcaagtactatccggactttgcggagatcaacctttttgacacgaacaaaaacttgctcgatacccagagtgtttcattaagtccggatagcagcactcagacattc

SEQ ID NO: 77480 - DNA, 378 bp, synthetic construct
  source 1..378: mol_type = other DNA
ttgaacggactgaacaatagtatccacgtcggtgattcctacttcagccttccggaaggctatgtggaaggcaatattgtcaaatataatgatgtgaacattactaatggcacgacgagcttacgcatcatcgaatacaacgacaacaacattcaggagcatattgacaaatatgtgaactacagcactaatcacaattattctacaaagattaataactttaatgttgatggtatgaacgtatataaatcggaaatcatacaaaataataaaaccttccattactggtttatcaagaaagataaagtttatgagattgtgacctgggacgggaatagttacaccgataacaccgtttttaacctgattaaatcaaac

SEQ ID NO: 77481 - DNA, 117 bp, synthetic construct
  source 1..117: mol_type = other DNA
ttttatcccatggacatcattccagaaccgtaccatcagtatatgattttaaacccgatattttggatcattgatcaattccgccacatgacgctgtggcagagtatgcctagcacc

SEQ ID NO: 77482 - DNA, 69 bp, synthetic construct
  source 1..69: mol_type = other DNA
actggtatgattccggcagatgcgatcacgaactatcaacagttaattgccggcaatatgaccctgcca

SEQ ID NO: 77483 - DNA, 33 bp, synthetic construct; identical to SEQ ID NO: 76952
  source 1..33: mol_type = other DNA

SEQ ID NO: 77484 - DNA, 42 bp, synthetic construct
  source 1..42: mol_type = other DNA
gatgacaaatttctgaaggaaagttacaaagagtattatagc

SEQ ID NO: 77485 - DNA, 168 bp, synthetic construct
  source 1..168: mol_type = other DNA
aattttaataacgcgatcggcattagttgttccgacgtttatatttacctgatcaactctttatattacacgggggaaaaagtaaatataaccaacttcatccatattagcccggtggtctgctttctgacttcgcttttctttcgcgtgggtttcgttgataaattg

SEQ ID NO: 77486 - DNA, 177 bp, synthetic construct
  source 1..177: mol_type = other DNA
atggggaacggccgctttgacgcagctagtcagatggcgaatggtgtgaaaggcacgaatggtgaattaaccgatccggcctacaacccagattcgagctattattttatgaactatattaattacatttctaattcacatactgttttcgagatcaaccctaccctgtactccccg

SEQ ID NO: 77487 - DNA, 291 bp, synthetic construct
  source 1..291: mol_type = other DNA
ttcacggcgacagtagagccgacggataaatacatgagtcccgaagagatttccaattacatcatcgactccaacccggattatgaaaacatgaccattggtgtctacaacatccgcccatatagctggtgggttggcagcaataccattggaatcccgtcatcgcatcagagtgaaattgagcaaagcaatatatcttattacatcgtgaataagcctatggataatctgaccaactttactgaaattaaaaacattaatgaattatatctgtataaaaataacaacttt

SEQ ID NO: 77488 - DNA, 168 bp, synthetic construct
  source 1..168: mol_type = other DNA
aatttcaacaatgcaatcggcatttcatgctccgatgtgtatgtatatctcttaaatgccctgtactacaccgggactaacgtgcatagcattgacaacatcttcttgtcgccggttgtctgttttctgacgagtcttttttttcgcgcgggtttcgttgataaactg

SEQ ID NO: 77489 - DNA, 183 bp, synthetic construct
  source 1..183: mol_type = other DNA
ggcatgggtaacgggcagttcgaagccggcagtcaaatcgcgaatggtgtgaaaggaaccaatggcgaactgactgatcctgcatacaatccggacatcagctattatctgacaaacttccccaactttatttccaactcacatacgatttttgaatcgaatccggttttggagtacccaacc

SEQ ID NO: 77490 - DNA, 291 bp, synthetic construct
  source 1..291: mol_type = other DNA
ttcaccgcgacagtagaacccaccaacaaatatctggctacggaagagatatcgaattatatcattgacagtaatccggactatgagaatatgaccattggggtttacaacattcgcccatactcctggtggattggccctaacacgatcattcttcatgcagatgccccgggtgaaattgatcaaagtaacgtcagctattacatctcacagagccgtatcgataacttgaaaaattttactgaagtgaagaactctggtggcttacacctgtatgaaaacaataatttt

SEQ ID NO: 77491 - DNA, 36 bp, synthetic construct
  source 1..36: mol_type = other DNA
gcgtatagcttactgaccatggattacgaaaaagac

SEQ ID NO: 77492 - DNA, 294 bp, synthetic construct
  source 1..294: mol_type = other DNA
agcaacttttcagcggatgtgcagacggatgattcggatgttaccgatggtggcagtggtaaacctaacgtcacttccgttagtggggattctgaatactatgtaatgccggtagcgaacttacataaagttacagtgaacggcgtggataagtccgacacgatactgaatagcgccgtgggcgtccaagcaaatgtcattgacaatggtaaaattaccattaaaccgggcgagatcgacatcactacccccgacggagttagcccggataaagctgtgcagcgcccacagctg

SEQ ID NO: 77493 - DNA, 63 bp, synthetic construct
  source 1..63: mol_type = other DNA
atgattatcgaaagcattatgccgtttgttgatgggattgtggacatcttcacccagggtggc

SEQ ID NO: 77494 - DNA, 45 bp, synthetic construct
  source 1..45: mol_type = other DNA
aaaagcctgggcgtgcatccggatagtgcggccatggcagaaggt

SEQ ID NO: 77495 - DNA, 897 bp, synthetic construct
  source 1..897: mol_type = other DNA
tatgaacccgctcaggaagaacttaccctggcaaagaccaccaaactaaatgagctgcatgaaatatataatggcccgttaacgacctcccagaacagtattttactggaaaaccagattaacgatggtaaaactccggaggaaattgagcggataaacatcctgaccccagcgactaaagactggcaatcgttccacaagaagtcgatttacacgaataaggataaatacaaccgtactatggcaatctatagcaacgaaagtaaaaacatcattctttcaaccacgaaggccatcaaaattgtaaatgagaataacgcggaagtcttgtcaaaaattaaatttgaagagccgaacacagtgagcgttcctattctgatctctcgcctgcaggcgggtgcgggcctggtaaacgttgggagcgtggtggacatttacacaaacaacaataacacaaatgaaaattacactccgaacaacaccagtccaaatattagcgggtgcaccgtgctcgccataatgcgttatgaagacaatggcgaaattgattccaaatattctaaatcaaatacgatcattaagggaaaccataccaatccgaaagaaaatacgaaagaattttccagcgatgttctggagttaatcaaaggctcgatcattaacggttatgacgaggaaaaaaccattgaaatccttaaaaattatggcatcaaactcagtaactacgaacgccaaattaacttgggtgatctgaacgcccagtatatgctgctgattgaaacgccgcaagataaagtggagtatgtcatcaacaatatggaaaatatcatcttgactatccccacaacgaaagctcctaattggatggtcaatgagatttctagcacctaccaggat

SEQ ID NO: 77496 - DNA, 459 bp, synthetic construct
  source 1..459: mol_type = other DNA
ggagaggtgaactacttttcctctaaaatcgctgtggaacgcaacattgatagcccaaccattctgataccgagcattggtgttaacgaaaaaatcaataacgtaagtctgaatcaaggtgtcctgagtgatccgggcgaaaacatccccacgaaagattatgtagcactgtatgggcatcgtactcttcagggttcaccatttttccgcttaaatgagctgtcgattggtgattcaatcctattagaatggccgggcgttggcgagctgaattacactatcaccaatacaacaattgtgccgggcaccgcggacgtccctatcggtggcaacgacagcttgttcttgatcacgtgcgacccgattgggtcgacggccaaccggataatcattgaaggaaccctcgaaaagcagaatcctattaacaatgaaattattaaagaaaatccgcaggagtcc

SEQ ID NO: 77497 - DNA, 57 bp, synthetic construct
  source 1..57: mol_type = other DNA
aacccaatcccgagcgagattatttatgaaaaaattatctttttaaatggcggtctg

SEQ ID NO: 77498 - DNA, 51 bp, synthetic construct
  source 1..51: mol_type = other DNA
ctgagtagcacgtatccgaccttcatggatgccgtgtttgcgattcgcaac

SEQ ID NO: 77499 - DNA, 75 bp, synthetic construct
  source 1..75: mol_type = other DNA
ggcacttgcccgacgagcgcgatcgaagttaccccgaacgccattgtgcattgcgatacctgtggtgaagagcca

SEQ ID NO: 77500 - DNA, 36 bp, synthetic construct
  source 1..36: mol_type = other DNA
ctgaaagtggaagaatatgaaattgcggagggcatc

SEQ ID NO: 77501 - DNA, 63 bp, synthetic construct
  source 1..63: mol_type = other DNA
gcctgcccgggcgattttatcgcagctaacagctcgtccctgaccgtggcgattccaagtgtt

SEQ ID NO: 77502 - DNA, 72 bp, synthetic construct
  source 1..72: mol_type = other DNA
ccgactgaggcgattcgcgtggttaccaaaaccggcatgagctgcccagcactggtcgaaacggatgccgaa

SEQ ID NO: 77503 - DNA, 60 bp, synthetic construct
  source 1..60: mol_type = other DNA
agcaacgatgccctgaaagttgagcagtatgaagtgaccattaatggcgaagcggtcgca

SEQ ID NO: 77504 - DNA, 39 bp, synthetic construct
  source 1..39: mol_type = other DNA
gactgtatcgaagcgtgcccgtatgatatgattcataaa

SEQ ID NO: 77505 - DNA, 39 bp, synthetic construct
  source 1..39: mol_type = other DNA
gacaccgcgattaaccagagttcctttgtgagcgatccg

SEQ ID NO: 77506 - DNA, 39 bp, synthetic construct
  source 1..39: mol_type = other DNA
atcccgattaacggcaccgcgttacatgtgtttccactg

SEQ ID NO: 77507 - DNA, 45 bp, synthetic construct
  source 1..45: mol_type = other DNA
ccaagcaaagtgttcattccgctgtttatgaaaatctttggtggc

SEQ ID NO: 77508 - DNA, 2190 bp, synthetic construct
  source 1..2190: mol_type = other DNA
agtgaaatctctgccgatgataccatcggcctagctgatgacggctctgatgtggtgatggatgacaaaccaattgaaccgtccaacccgacaaccccgcataaagtggatacaatgatcgtctcgagcgacactgtctcgataaacgaaaaggaaaaaattaaatcaattgatctgaccgtaaacgataccaataaatctaaggtcattgccgggatcaccgtgaaaaatctgacagttaaagaagggaccaagaccatcaaatttgattataataattcgaaggtcattatcaaggacgcgttggttcttggtaaacatgacctgctggttagctatctcggtaacgaaaactacactaattcttcgaaaaacattgttctgaccatttttggaaattatacaatccaggcaccaacgtccgtggatgtcaacagtaccaaaattgtggaggtgcccatcaatgttaccaacggtatcgatccgaaagaactggtcaaagatgattttaacgttaccctgacatataaagatggcaatatcacgaaagctattaacataacggatttccgaattataaacaataccatcatcttcaactatccgctctcccgtaacattacgacctccaccatcacccttgtttatactgcgaatgaaacggtgaaatcaaaaaatgttaccataaaccggatttacaatgttaagattgaggggattaatacgaaaaaccagtacaaaaatggtaactttaccttccgcctgaccgatattgataatgcaacggagaatttgacgggtttcaaactgaacctacttattggtaaaaatgtgatcaaccagattacaggtacggctgacaaaaatggtattgtaaactttaaaaccagcaagattttcggctatgacttcaataacaataccattgtcatcaaatacctgaacgtgggcaataacactgtggaattgaaaagcggcgacaacgtgaaattaacaaccaacaaagttaatttaactatcgaaaaagcaaaaatcaacattacgattgataagtacaacgagcagtatggaagtaacaagaatttaaccattacggttatcaatgcagataacggggagccggtgcccggcatcatcctccatctgaacatgcctcaaaccgccggcaaaaactattacattcagacggacacaaatggcatcggcatcatctcggtgaaagggctgattcctgggaagtacaatctcacggtaagcaacaacgacacggtgaatattatcaataataaggccagcagtaaaattattattaccccgaaaccagtgaccataaagattacatctggtctgactatcaattataacaccggcaatacggcagccatcaaagttacggataaaaaaggtaaaggcgtgtctggcgcgtatgttctggtccaactgtatactggttccaaatcagccaactatcttttccaaactgacaaatatggaaatattaagtttaaagcaccgctgagcgtggggaaacacaagattgtggtgagtggtgcggtcggatacagcagcagcaaagtgaccaaatatattaaagttaaaaaggctacggcaaagatcagcgcgccaaaggtaaccgcctactacaaacagggcaaatactttacgatcaagttaattaacacgaaaaaaagcaacgccccgatttatgctgcaaaagtcgacatccgcgtgtacatttcaaattacaaatactacaaatttaacggaaaaaccggagtggacggtaaactgaaattgtcgatcgatttaaaaccgaaaacatataaagtcgaagttcgtggtgccgattccaagaactatgcggcgagcaaagtagtgtccaaaatagtagtggtcaaagctcccactaaactgtatccggcgaaactgactgcgaaaaaaggcaccaataaatactttaaggttactgtaaaaaacacaaagaccaaaaaggttattcctggcgttaaagtcaagatcaaagtctatacgggtaaaaaattcaaaacttatactgtaaaaaccaattcaaaaggcattgcgcagtttaatgtaaagtcattgagtgtaggcaaacacaaagcgattgtaagttcggccaacaaatattgcattgcgaaatcagcgaaaaactacataaagatcacgaaa

SEQ ID NO: 77509 - DNA, 180 bp, synthetic construct
  source 1..180: mol_type = other DNA
tacgaactttccagcgtggcatcaacgatgttagcctccagttctactgcggatattaatgaatcgatcctgaaactgatcacctatttgcatatcgacgttaatccgaacgagatttctcagtcgattattagctcatttgaaaccatagctagctacgtcatgaactatggcgtaagt

SEQ ID NO: 77510 - DNA, 465 bp, synthetic construct
  source 1..465: mol_type = other DNA
gctcaggaagataacagtgacatcaccatgatgacgctctcgaagggggggatcgtgattcattacccatcaaattggggttattcgcagtccgattctaattattccataatgtcaatctcgaaactggattcagttgactccgccggtgtgggccaggttaatatcaattttgagaaaaaagcgattgaaggagacttttatacttacctgaataacacctaccgcagcatgcaacgtgatagctctttcaaccttaccagcagtggtgaagtcatggtaagtaatattcatgcatatgagtacatgtattctagcaaccagaacggcacggtaaaagagcacaaggcagtgtggttcgaaaaaggcggccaggcgtatgttatgttgtacagcgccccggtgaacgattttgaagataacttatacgtcttcgactatattctgagcgatattcaaattaca

SEQ ID NO: 77511 - DNA, 336 bp, synthetic construct
  source 1..336: mol_type = other DNA
gtgtttaatctggatttcaacaatatctctgagacatccaccgtagcgatggttcatgataccgcctttccggatattactgaggatattaaaaacactaccaagacgacctcttcaagcaacacgaactacagctcgacaagttataacgtcaaaaccacggaagattcatccagtgactcggactactcggacgggggccgtaattctggctcaagtgatagcacgtatagcggtagcgactcgggctccggatcttcaggttcggatagcggctcaggaagcgggagctccagtaatagtggtggttccgaatctaatggccgcagcgatgaa

SEQ ID NO: 77512 - DNA, 93 bp, synthetic construct
  source 1..93: mol_type = other DNA
agtttcacgaaagcgtggggtgcaaacccggacactttttttgctagcaatgtgctgcaggccaccgattccatttcgggcatcttccaaatt

SEQ ID NO: 77513 - DNA, 72 bp, synthetic construct
  source 1..72: mol_type = other DNA
ctgaccctgccaggcgccagcattggttatacccagatctttactccggattggaatgcgttgacgaactta

SEQ ID NO: 77514 - DNA, 108 bp, synthetic construct
  source 1..108: mol_type = other DNA
gggtttatggccttaagcaccaaaattccatttgatcagctggtcacggaaggcaccggtctggcgtttgtagttttcccgcaagtgttcaacactatgggcccgatg

SEQ ID NO: 77515 - DNA, 72 bp, synthetic construct
  source 1..72: mol_type = other DNA
acggcggcccgcagcattttcttaaaagatatcgttgcatttcagcaagtgcatggcccgttcctgtttacc

SEQ ID NO: 77516 - DNA, 105 bp, synthetic construct
  source 1..105: mol_type = other DNA
agcgggtttttcctgtacaatgtgggcaccgacttgctgaatgtcgtgccgccaactattcagaacgtattacattatccggatgttacgaacgcgggtattatc

SEQ ID NO: 77517 - DNA, 102 bp, synthetic construct; identical to SEQ ID NO: 76986
  source 1..102: mol_type = other DNA

SEQ ID NO: 77518 - DNA, 93 bp, synthetic construct
  source 1..93: mol_type = other DNA
aattatggcttacactactttgggggttatgaaccaatcctggataacgtgacgaacgttgtctaccatccggcgattacctatagcttcact

SEQ ID NO: 77519 - DNA, 72 bp, synthetic construct
  source 1..72: mol_type = other DNA
ctgacgggcagtgtaaacatcaccgatattgtgactgcggttcataatggtttagtcaacgccaaaagcccg

SEQ ID NO: 77520 - DNA, 42 bp, synthetic construct
  source 1..42: mol_type = other DNA
ctgattatccatggtattagtagctttgtgggcgggatctta

SEQ ID NO: 77521 - DNA, 90 bp, synthetic construct
  source 1..90: mol_type = other DNA
gggtacaaagccggcggcgtggttccgattatcatgccgggtatggataccagctggtttgctagtaacgcggcatatccactgcctttc

SEQ ID NO: 77522 - DNA, 39 bp, synthetic construct
  source 1..39: mol_type = other DNA
agtagcctgtttaaattattcgaaatgtacattaaatat

SEQ ID NO: 77523 - DNA, 87 bp, synthetic construct
  source 1..87: mol_type = other DNA
atgcacctgaacattatcgacagtatttactatagcatcattaccatggcgactgtgggttatggggattacaccccgcatacgggc

SEQ ID NO: 77524 - DNA, 42 bp, synthetic construct; identical to SEQ ID NO: 76993
  source 1..42: mol_type = other DNA

SEQ ID NO: 77525 - DNA, 96 bp, synthetic construct
  source 1..96: mol_type = other DNA
accaatatgccgccgattgatgcgatctttgagagcatgagtgccctgaccggcacgggtgtgacaatgtatactaacctggaaattttaccacat

SEQ ID NO: 77526 - DNA, 99 bp, synthetic construct
  source 1..99: mol_type = other DNA
gggatgccgctgttcgatagtttatgcaataccttttgtatcattagcacgggcggtatgaacgtgaaaaatgcgaacatgggctattaccataacgac

SEQ ID NO: 77527 - DNA, 102 bp, synthetic construct
  source 1..102: mol_type = other DNA
tcaaacattgtgccgatggaattgctgtttacggttgtctcggcaattacaaccactggcgccagcatctccagcagtctgaccatggcgagttggccatct

SEQ ID NO: 77528 - DNA, 93 bp, synthetic construct
  source 1..93: mol_type = other DNA
ggccatgacccgttcgatagcttatttgcgacggtgagtttgcagggcaacaatggtctggatctggggattattaccaaccaaatccaccca

SEQ ID NO: 77529 - DNA, 117 bp, synthetic construct
  source 1..117: mol_type = other DNA
ttctatcctatggagatcgtcccagccatagtgcagcgtatctttaccctgaacccggtttactccgcgattagttgcttccgcgaatgtattagctatggcatttttccgaatacg

SEQ ID NO: 77530 - DNA, 441 bp, synthetic construct
  source 1..441: mol_type = other DNA
tccaccacggttggcaatgcgattacggtagtaaacaagacggtggtcaccctgccaaacgaatttagcatagaaagtcgcgagactggctacggtaccctgattaataaaaataccaaggaaaaaattaccatcaaagatctgggtaaagggaacttagctttaacgaagttcaaaaacgcactaacagatcttacgaaaaacccggacatcgatcatgttaaaaattcaaccagcaacattaataatatcactgcctacaaaatcgattatcaggacatcaccaaagagaataattcggatttgagtaatgtgtacgtctttacttgcaaccacacattcctgattaaactggaaaattataacaacaacgtgaagagcgataacgatctcgattatgtgattacacatatgaccccggactttaaacagtctcaagac

SEQ ID NO: 77531 - DNA, 3447 bp, synthetic construct
  source 1..3447: mol_type = other DNA
gaaaatgacgttgccgtaagcaatgatgtgggcattgttaatgagactgtgctagaagtcagttctgatgattcggacttatccgaagcggatgttttagaaacccagacgaacgttgtcactaaagataccttccataattactttggaaatgatgggacactgctggacaacgtgtcgagcgatgagctgatctttaaaggagattttaccggaatcgatgtcagctatatgacaattggtaaaagcgttaagttgtctggtggcaacactaccctgaataacgttacgttcatcatcggtgccgataatgtggtgattgatgggtttgtgcttgatcactctgatgtgtacctgtttgatatcgaaaatgtcaacggcgtaacgctgtcgaacaacataattaatttcaaaacacttgaagggacagagggctatgctatttttgccaacacggtcaatgattttaaaattatcaataataccatcaattatgttggtaatacgaaaggcacgatggttaataatgctatccgtgtaacgggcgatgaagactctgccatcgcgtcaaaaaagatcattgtggaagggaacgtcattaacatcaaaatcccgtctgtggatgtgggttatgatccggtgacctgggaaagcaaagtttttagcgaaggcattgttttctattattgtgaggacgtaaagtttatagataaccgggttgatctgaagtataataactttagtggcggtttcgacactatctatgcactgagtgtacgtggaaatccgtataacttcgagaatacaattgtgtccagcgacatcgaaatcattaataatacaatcaatgctaacggacataattatatttacaccatcttcctgtctgcgaatgattttaaactttttaataatgtcatcaactcaacagcggatttttattacgcgaacggcattaatatcgatggcccggcatcagaaggtattgtaagtaacaatttgatcagcgttgaatcaccatatgatgtgtatggtatttactcttaccagatgaatggccccattgaatacattagctatgtcaataacaccatcatagggaaaagttatgttggctgcgggatggaaatcgttgaatgcaatccgtacattgccgataacctcataatcatgaatggtaattatacttttggggttgttgcaagtattcgcgacaatggcacgatctctaacaattccatctcgtccctgggaaataataatggtaccgatggcactggtgatcctttgttgccgctcaactcactcggcattagcgtcaagggcagtgtattgattgaaaaaaacaaaattaacagcgggggcattggcctgaaccttgtcgaaaaaggcaatatcaccattaacgacaacaacatcaacgtgaatacgactggcggtgtggaaagttatgcaatctactccgacaaactgagcaacttagttatttctaacaacaatatcctctttaccggaaacaccaatggaactatggtgaataacgcgatccgtgtaaatggtgacgaaaacaaaaaaataattgctaaaaacatcattgtggacaacaataacatcaacatcaacattccgagcatcgatgtgagctacaatcctgtaacctacgaggccaccgtgtacagcgaagggattgtgttctattattgtgaggacgtaaaatttatcgataaccgtgttgatctgaaatacaacaacttcagtggcagtttcgatacgatttatgttgtgagtgtccgaagcaacccgtacaattatgtttttgatgaggaagacaacatcatctattccattgtcagttccgatattctgatttctaataacacggtcaatgctctgggcaataactatacctatggcatttatatttcggcggagaattttaccgttggggacaactttgtaaacatttcgtcggacggtaagtacgcgaatggcgtcaacgttgatgccttgtcaagcaacggggttataaaaaacaataatgtgatcgtgaatgcggacattattgtgtacggcgtgtattccgccaatttcatgggcccgattgaaaacattacttatgacaacaacacaattcgcgtaaacgcttatgctgcttgcgcgatggaactgatggagccaaatccttatgtttttgacaacacaataattgcggcgggtaattatacctttggcgttgtcgcaagtattcgcgataatggtaccattagcaataactcaatttcgtcgttaggcaacaataatggcacgaacggcacgggagactcaatcctgcccctcaattctctggctatcagcacgaaaggtgatgtgataatcaaagataacgagattgtgacctcagggattggtgtgaaaaccctgaagggcaatgtggatatcctaggtaacgacattagaacgaccggtaaccacacgatcgaggcgatcaactcgaatctgaccgtcaaaaataattacttggtcagcaaaaaggccgtaggtaccgactccattgtctccgacaaggaagtgataagcgcgaacaacacgccggcactgaaaaccattatatctgcaccaaacatattcaccgaatacattaaaggtgcggtattcccagttgcggccctggatgaaaatggagatcccatttcagatattgtgctctttttaacaatggacggcattgtgtataatgtcacgactgatgcaaacggctatgccgcatttctgcttaacccggactccggtatccataacgtggtggtctcctttaatggtaacgaggtctatggtcctaaatcagtaaacagtattatttctgtggatgccagcgcaagcaaaatcgttgcaaaaacctcgacaaccgtgtatctgactagcgttaaatccggttcatactttaacatagcggtaaaggatgtgaacggcaaagggctggcaaacaaaaaagtttcgatctacttcaacggtaagaccaagagttacacaaccaactcactgggagtaatcaagttcaaactttcggcgaacaaaattggtaattaccagttaaagatgaaattcgcgggggataagaactatactgccagcaccgcaattgccaaaatcaaagtcattaagcaagccacgaaattaaccgtggcgaaaaagacgttcaaagcgaaaactaaagtgaaaaagtacacgattacgctgaaagacaacaaagggaaggccatcaaaaaggccaaagtgacaattaaggtcaaaggcaaagtctacaaagcagtgaccaactcgaaaggcaaagcgacctttaaaattaccaaactggcgaaaaaaggtacttacaaagcttatgtgaaattcgccggtaacaaatactacaaagtatcttccaaaagcgtgaaaatttcagttaaacgc

SEQ ID NO: 77532 - DNA, 3990 bp, synthetic construct; identical to SEQ ID NO: 77001
  source 1..3990: mol_type = other DNA

SEQ ID NO: 77533 - DNA, 4608 bp, synthetic construct
  source 1..4608: mol_type = other DNA
aacaacacgacagtaacggatgtgctgtccaccgtcgaagatgatgtgggtattcaacagatccagagttttcaagtagacgaaccgctattggcggcgacgaataacaacattcagattaacgttaaacatcattataatgaaacggctaatacatgggatgaggatggctacaatctagcgaacgccaccgtgaagctgtatggtgcgaacgacaaactgatttcaacacataagaccgatagcaaaggttcagtgctgattaaaaacctgaaatcaaccaaatactatgtcgaagtcagctatgcggattacgaaccaaaaaaatcgaaagtcttggattttacgaaaaaatccggaaccctgaaaggaagcttcgactttatcccggatatcctgctgtttgtcgactacaaatcccataacgaaaagctgaatgtgctgatgaatatgagcaagcgggtggccttcatcagcacggggcaagactatgatgtgagccgtgaatggctggttgggtatgcccgtttcattcacatcgacatgttttccgaaggcgcctatgccattttcactgctgaaaaactcaaaaaattgcttgcgatctctccagctaatgccaattacaacgtggcatataccttcggcgtgtacagcaattccattttaaacgcgacgggtctgcacattgttggcgccaactcgaagaacaacaccttcaatactattgagaacacctatattggtagctatttccaagccaaagacattaacctgagcgatgttttgtatcataatatggaaaactatctgaaatatgtgtattatctcattaatccgtcaaaatacgaaaatcccacacttaatgattcgaatgcgcctcagatgggtccagaatgtggcttttaccatcccgatctggggatcttcaccatctacccggagggtagcctgataaacaattggattaaaacgaatccgggctatggcgtcgatggaatcggcagtctgaattggatgatccaggattaccccaagtggttcgtcgatctcttggacccgacgaccctatttgaacagttcgaaaatcaatttattgaccgttttaacccgaacaagaaattcatagcgatcgtctcgtactactgtggtggggaagttgttgactctctgattcgcggttatgaagaaattggccgtccagcattcaacgtgtttaaattttctacagatccgtcaatgtcttccatactgaataaaattaataacgtctcaaagataggaattagctcgattacgagtctgtacagttggagcctgagctatgcgaacggttctgcggaaaaagatctgtctgacattgatgtggaaatcctgaaaggtgtaaacgaaatttcaaaatacagttatgaaagtgagcttggacctcaagttgagtggacctactcggtgacttacccgagttttgaaggggtgtttagtcctgttattctgtcgtatctagatgaggacaaggtgcatgtcatccagagcggcgtggacaagatggtgcagctcagtagccgctgggcggacttgaaagacctgaataactctgagaaaaccatagcgattgtcctttataactatccgccgggtaaagccgaaattggcgccagctatttggacgtaatgcagagtacttacgatttactgattaaattgtatgaaaatggttatgcgattggggatattcgtaaaatgatgaacattacagagtttacgaacttactgattgatagtggcaacaaaggctcatgggcggggggtctgctgaaaaaatatgtggaaaagaactgggacgaactggtgaaacataaccagttaatctccatggatgagttcatcgatttaacatcagatctgccagatgagctgtatgaggaaatggtgacgcagtggggcgcgggtttaggcaaatcaatggtctacaccgcttcggatggtaaacagtatttggttattcctggtgtttggtttggcaatatttttatcacttaccaacccagccgcggttgggaagaagccgatattggcgaagtgattcaaaattaccatgatttgaaactgccgcctcatcagcagtatgtggcattttacgagtggatggataaagtaaccaaggcgaacgccattgtgagcatgggaacccacggcacactggaatggttaccgggtaaaaatatcggcgttggttcgggcgattggtcctacgaactgacacgtatccccaccatatacccatatattgtatctaatccgggtgaagctatggttgcccgcgatcgcggtctggcaatgcttattactcacatgacgccggctatcgtaagctcggagttatacggcaattactcgatcctgaacaactatatcaatagctataataatcagatcaaactcaacgtgacctctaacgcgaacatctacaaagaaaaaatccttaaactggctcctaatctggggttcagaaagatgtcgaaaggggagtcttttaaccactggctggaggaactgcacctgtatctggaaagtatgggggatgacctaatgacctatggactgcataatctgggcaaagtccttacagggaatgaactatcggaagaagtcgttaccatcgtaacgtcgcagaccaagatttataatcaaatcatggaatttctgtatcctaacttgaaaggcaaagatttttataaagatatccagggcgacgtaaaataccttaacgaacgtcatactattcaggcattcttacgtaactatgttgacggcttagtgaacggctcttcggtgttggatctggtcaataagttaggtgtaaataaagacagttccctcttctccagcatgaaatatgcgcaggatgtcattatcaacatccaaaacaacaatgagtggaatgcaattctcacggcactgtcgggcggatatgtgaaagcaggcctgtttgcggacccggcatacggtgattcaattccgaccggatatgacggctacgcctccgacccgacgagaatgccatcggaagccgcctatgaatctgcagtcaatatagtgaatctgttgctggcggattattacgaaaaacatgggaaatggccggaaatgaccgcactgatcctgtggggcaccgaaatatcacgcacggaaggcattggtgtcgcagaatttttatacttcctgggatgcaaaccgaaatgggcagaaaacggtaaagtaattggcgttgagctgctgccgttaaaggacctgaaagttaaactgcacaatggctcggtagttaaccgtcctcgcattgatgtatatgcaagtctggttacaagtaacaaagattggattacctggatggtaactgccacccgactggcggccaacgctggcgagagtgagaatgacaattatgtgataaaacattacaacgaatatccgacgcttgatcgcttatttgggcttccgggcaatatcctggagggtactggtatgagcacccttattccaaacaccgcgaattggaacatctccaccgtgaatgtggaaggcatgaatgtgtatttggataccgtttccttttcatggaccattgatgagaagggtaatatcaacatcacgaaacagaaagacacgtacaagtacctccttacaaaaacagagttaataacccagaacctggatagtacttggaggattttagactctgatgattactatgactggtttgggggcttatataatgcggcttccattctgcgacagaaagcaggtttaagccgtccggatacctcattcgttgacatccgtgacaagaataaatatgttacccgcacttatgaggaagagatggagttcgaaatccggaccactctcttgaaccccaagtaccttaaaccgcttaaaggcacggctgccggcatgaactggatcgctagccgcatgcagaataccttcgggattttgacgattagtgggaataagttgaacaaggagctgggcaatcaaatgtccaacacccttctggacctcgctagtggcgttcgcgatgcaagcacgtcttacggtatccagtcggcgattgcgcacatgatctacctggcaactcagggtacgtgggatgcagacagcgaaaccctccagaaactcgcggatgaatatatgcggcaagttctcaaatacggtgtggcctgttgccaccacacttgcaaaaacctcgactttaataacaaggtcatccaagtaagtagcctgacgcctgcgcagaaagccgaatttgccaaaatcttggcccaagcgaccaacactgatccgctgtacgaggtggaaaaggattccgctaacaacgataataatgcacaaggaatcgttaacggaaccacgaaagataaacaatcagatagcgaaagcggggataaaacatcttttggaggcgattcctcgcaggccggtgatgcaaaaagtgctagccagagccaggactctagcgactcatcaggtgattcaggtgcggatgcctatgagctgtcccagcagtccgcgagcaagtctactagcggcgcggaatctagcatgcca

SEQ ID NO: 77534 - DNA, 765 bp, synthetic construct
  source 1..765: mol_type = other DNA
gccaatgattaccagattgttataacctacggtgaaactacaaagaacaacgcggagtataagaacactgtggattcattctttgagaatcaagcgcacatggatttaaaaggagtaaattccaaaatcatcacggccaacgaagtgaacaagattagcagtacaatcacgggtaaaagctataattcgaatcagattttttcatcggcactggtggatctgggtgataacgataacctgaaagttagcgtagacaaaagcaaaattaccaccatcactggcgatatgtatctctccgcattaaaatcagccggcattaccaatggccatgtctatataaccagcccagttactgcgacgggtgaatctgctctggcgggcattatgaacagttatgaagtcgcgacggatgtggaaattccggcaccggttaaagaggctgcaaacaaagagatttatactcaagcggaaatcgtgaaagagtccaacgtgagcgccgacgacctgtcgaacttggttgacgatgtcaaggaaaccgtgaaagaagaaaacatcaccgactaccagaccattgtaaatatcatcaataacacgaccattaattacaatatcaacctgacatataatgatattgaaaaccttgctgagtctattgaacaaatccagaatgttcagggcgatattaacagttaccagacagaagtcaatgacgtgttgaatacgaccgatacctctaatacggggtttctggacgggctattcaac

SEQ ID NO: 77535 - DNA, 24 bp, synthetic construct
  source 1..24: mol_type = other DNA
atggaagctattcctactatacca

SEQ ID NO: 77536 - DNA, 459 bp, synthetic construct
  source 1..459: mol_type = other DNA
tatggtattacaaacagcgataatccgatcttctctgacctgtccagtatgtccgccaacgataatgatgcgggcaacgggatcggtaataatacagttacggggaatggcagtggaaacactatcgccaccacgtccggttcaggcagtggcagcagcagttcgtcaagctccggaagcggttcgggttcgggttctggcagtggctctagcagctcgagtagctccggcagcggctctggttcggggtctgggggaggctcaaatagcaactcacgcacccatttatcatattccgaagcaaaatcgattgctaatgatgcgattgaggaagctggctgctatgccggtagtggctcatattctgggggctactggtactttactgtatacgatgcaaatggtaacaacgtcgacaccataagcgtgaacgacaacacgggtgcgaccggtcgtgga

SEQ ID NO: 77537 - DNA, 66 bp, synthetic construct
  source 1..66: mol_type = other DNA
ctgaatgttttcccgaatcttaacagcattgtgatgtccagtgaatatatcaacaactcgctgttt

SEQ ID NO: 77538 - DNA, 48 bp, synthetic construct
  source 1..48: mol_type = other DNA
ttgatgggtccgattgcgagcctgaaccaggtgaccggcctgcatatc

SEQ ID NO: 77539 - DNA, 354 bp, synthetic construct
  source 1..354: mol_type = other DNA
aatacggcgatctccattccaagtccggattattcgtacgacagctgtgaatttcgcacggcacaggatgtcatggaaattctgagcggcaaagtgaactttaccgatcgcaccttcattggtgagatctcgaagatcctcaaggataataaaaacagcaaagaatctattaatctggttagcaagatctgcaaaaacaaatttaaaagcttaaatcttactaactatcggttcaccgagaataaaattctgaaagaaaaaatattggactcctcaggggattactccaaaagtaacatggtgtcagttgccacacgtaactatgatgactattcttacactctgagtgtatgg

SEQ ID NO: 77540 - DNA, 33 bp, synthetic construct; identical to SEQ ID NO: 77009
  source 1..33: mol_type = other DNA

SEQ ID NO: 77541 - DNA, 54 bp, synthetic construct
  source 1..54: mol_type = other DNA
gcgtgcggcgacctgccggataaaaacaccgccagcagttttatgttctatatt

SEQ ID NO: 77542 - DNA, 2736 bp, synthetic construct
  source 1..2736: mol_type = other DNA
gataacaaaaacgaaacgctgttaactcagaaagagacggattcaagtcagaaactgtgcaagtcatcggtgagtaaggaaacgtctaagaaagaaaaagtcacgcttaaagcgcctaatttgaaaatgtattataaggatggaagtaaattcaaagccaccgtgaagaacaaaaataaaaaagcaatcacgaaggcgaaagtggattttacggttaacggcaaagtgtataacaaaaaaacggacagtaaaggtgatgcttaccttacgattagcagtctgaagagcggcaattacccgattaaaatcagatttgcggggaccactaagtacacggcgatctcgaaaaagagcaccattaccgtcaaatccaccatcaagagtaatgattttaagaaatactataaaaatacctcgccgtacacgtctaaattctataatcagaaaggcaatatcctcaaaaataaagccgtgaaattcaagttaaataagaaacattacactgtcaaaacagacaaaaagggtgttggtaaattaccgattaatttaaaacctggtacctacgccatctccattatcaatccgaagacctctgaaactgtaaacaaaaaaataactatcaaaagcctcattaaaacgaaagatctgagcattaacgggcagaatgatggtaagtttaatgtcaaggtattcaataataaaggcgaagtttatccgaaccagaaagttacgtttaagattaacggcaaaacctattccaaaaaaactaacaaaaacggcattgcaacactggacatcaacctggatgtggggaaacactcgatcaccaccgaatatatgggtcttaaaaatacgaataaaatcaacatcaacaaaatagtgaaatccaccaattatatccataccacgttaattccaaactatgttaatgttaccgccaaatacgtggtgaataactctgtttactgtcttaaatctggtatcaacggcatcataaagatgccaaaaaacgagatctttaaaattcaagttgggggaaaaatttacacatttacgacgacttctattaacggcatcaattccatcactctgcgctacaacaataattatctagtgccgtttgatgggagcggcgtcaaaagttatacaaaccgcaacaagctgacctcagatgggatcattattagcaaagtaaacgattacacacagattgactatcagagcaaaacaaaagataataccgctctgtttggtttttatgcgagcaagggtttagataaaagcgaaaccctgacatatgtggaaaacgataaaatcactgcgaaaattaacttcaacaccttgtcgtttgatgaatttagcctgcgttacagcctgtctgcgttgcatggtaaaaccatttacaatttcaattatggcaattacaatgacacaattcggttcgctaacaccaacactcccgtcaccttttcgtattttggtaactcaatcgtaggctacgcctcgcaggagaccattatcacgaaatttaaagtcgatgaaattaaagaagtcgaaaaagaagagaatatatcgtacggccttaacaaaaaatatcgcactgcgatgggatttgaagttctgcaatcatatactctgattaatgagaaaatcaatcaaaaaacgctggagaattgggttttgaaaaacccggactatctgagccgctttggcgtgatgaacatttatggcatgcatctggcgtctcttgaggtagcttggattgcagatataatcgcggacaagagctccaaagagctgaacgtgaattggaaacgtaacaataccctcacaatcttgggtggtatcaacctggaagacacgtatctgaacatactaaatgcagacatgggtatgaaggtcaccggcaaattcgacaacgcattcctcttcaaactgctgaactccatgaatttaccgaatattgaggaatatgccttgttgaaggttgcctatcgttacttggataaatcgtcaaacagcctggataacgtatttttatccattctcaagaacaacttctcgattgcgcaattagatgacatgatttacatcttctcagaagccaattccaaatctgcaattatcctgaacaccagcagcggagtgtcatcggtagtgctcgctcagaactccgtttataaaggcagttccctgaaaaccacacatgactgctgcggtgtgggtattatcccaaaagacatcataaaaggcattaaggaaacctttaacattattaataacggactgtctaacatttaccccaataagacacacccaattagtaaactgttttatatggctgcaaatctgcttgccaaaccgctgaacggggtcggctcactgggtatgaatctgattaccaccatggcactgatacagagtggtggcacgacatatcgtaacgaaatggtggaaaaaagcgactggcacgaagtgatggataaaattacgttcacccgtcccggctatctccaatcaaagaaaatttacaacattccgaatgagaaaggcggatgtgatttcattgaagtaaagatccgagatgatatgaccttggatcgcaataatgcgatctatatcagtgacgggaaaacgcggaaactgagcaaaaccgagacttacaaatatttcattgatgactactggaccccgtttagtatgcctcagaaatattgggataaaagctggaaccgc

SEQ ID NO: 77543 - DNA, 42 bp, synthetic construct
  source 1..42: mol_type = other DNA
ccgtatctggcctacggttatttaggcaaaccagaagcgctg

SEQ ID NO: 77544 - DNA, 36 bp, synthetic construct
  source 1..36: mol_type = other DNA
ggtaaatttctgaccttcgatgacattggctttttc

SEQ ID NO: 77545 - DNA, 54 bp, synthetic construct
  source 1..54: mol_type = other DNA
gaaccgaccttacgcgttctgtactttaaaaacccagcctatgtggcgggcgca

SEQ ID NO: 77546 - DNA, 210 bp, synthetic construct
  source 1..210: mol_type = other DNA
tggaacatgcagaatattgtattcaacgagaacatggatgaacaacagaaggaaaaagtgaaaaatgcgattaaggaggtgtcacaaattgaccagggcaatgaattaaacgatacgccggatatcagtaaaagctccggaaaaggttttactgaaatggggaaagtctatcgcgattcggacaccggcaaactgatcatggttgaaggt

SEQ ID NO: 77547 - DNA, 63 bp, synthetic construct
  source 1..63: mol_type = other DNA
atggtggcgattccgggcagtgaatttctgaccgccgcattaaacgtcgttagccagtccctg

SEQ ID NO: 77548 - DNA, 51 bp, synthetic construct
  source 1..51: mol_type = other DNA
ccgggtctggccgcattagggaacggcgatgtgagcaccctggctgcggcg

SEQ ID NO: 77549 - DNA, 33 bp, synthetic construct
  source 1..33: mol_type = other DNA
aaaattcagttaaacagcattatcggcagttat

SEQ ID NO: 77550 - DNA, 57 bp, synthetic construct
  source 1..57: mol_type = other DNA
aacatcatcagcctgaacatgggcgatatgaaaccgattaatattgtgagtattgac

SEQ ID NO: 77551 - DNA, 372 bp, synthetic construct
  source 1..372: mol_type = other DNA
gctcatccggggcatggctcggagtacgtggaagaggtgacatctgacgatgtcgggtcatccagtaattccggctcttcatcaggtagcagcggctcgtccagtaacagcggtggtagcaccgttccagcaagctcttcctcaagcagctctagcagctcacgcagttcgagttattcgagtagcgacccgtactcgagtagctcgagttcttcaggagcgcacgattccaaccacgattcatatcagggttccagctctaatagcgttgtgaaagataactcgtctctgaaggacgccaataaaaccaatgaaaacttaactaacgactccggcgaaattgataatgatgaactgtttacggtaaacaat

SEQ ID NO: 77552 - DNA, 2829 bp, synthetic construct
  source 1..2829: mol_type = other DNA
gaggatatcggcaattccgacgtgtttgagaacccaatctctacggatattcagcaggatgacctgtcggaagatgatttggacatatcgaatctgaacgtgaaagtgaattatcaatacgctgatgataatggaaaaataaatccgacgattaaagttaacgataaacatattatatcaaaagaatttaacagtagctaccagaactacaacgtgataatcaactcgaccaacattgccgataagcttaacatttctatctctgcaccgggctatttgacgcagtataaaatagtcaccccaaacatggggaaatcgattttggcgaatgtcacgtttaatatggaatctagcgaaagttacaaactgggtcgagacgtgactgcggaagccgataagctcctggattttaaaaatgcggatgatgtgctggccattacaaccgcgggtgttgcaaaatataacgggaagactagcgaagatgccatggaagcaatggttaactatggaaagatctcgtatagcaatattttaatgctccgtcaaagtgcgattgatccgattgatttcgcgtttattgttaagaaaggcaacgagttaaaagcgatcattttccagaatgcctccacaaaatattcatacctgggaacgatcagcgagaacatgacaaaagctcaatggaataaatattataagtcacttgttggtgaaaactcctgggcatttgcgagcttggcaaatggttgggcggctggggtgtcgcgtgaaattctgcaggaagccgctttccatggccacatctgtgaaggcactctgggcggctatagcattattcaagcgctgttgaaatactatccgccggagcaggaaaataatccgggtggcatcggttcgccggccgatattactgcgtataaagtactcggagtgccgggcggctcggatgatgacgcagccctattctttctggacgataccattgggaaaactggttacgcgggtatgaataccaccaacaccggggcgactgagaacatgattggcttcattaaatggaacagcaaacagaagacgggtgatctgatcatcatgtcattcaattccactaaacttaaaaaactgttcaaaaaagaaaccaaaataaacgctgacgctggcagtctggaagaattaaaatactgctcttggtggattaacaaaattaacaataatccagagaagctggttgattttctgtatgaatttacaggtttaaaccaggaacagtataattacctgatgggcaccacggaaaatataacctatgatggtgaacctgccgagtatggtctggatggccatggtctggacctgaactatatcctcagcctgaacctccccaccgcgaagcgtaccatcaacagtgtggcgcacgcgaaactgacggatgccgaacttaaacaaatcggcatcgacgcagccaataaagcgaaaaaaatcttcaacgaagagttgggggttgaaattgatcgcgatgacattgattttctagcgctgactgacgcaggctacgcattcttaaacggccaagataccgtagtggtgcgggatggtcttcatgaagtccttggcggaacactgtatagccaaaaccttctgagtcttcaccaggctgtatggaaaccgttgtggtttgccttcgccattcgttatccggattcggacctggttgacatgatttacctccgctataacccagatacgaaagacttcttcgtgggcacgcttgatggtaacagagtggtggacattggtttcgaaaccttaaataatagcgataaactgaaagctattgcaaagtcttttgtgccggacggaaactggtttaatattcaaagtattgtcaacgcatggaatgagcacccgctctttgatcagatggctacgttcttgtatcatgctcacgtatgccccggcgtgcagccgggtttctttatcaccgattatattcaggaaaagtaccccctcggtgaaaatgaaagctacacgtacattgcctctagtatctattgtaaagacgacagcctgacctatctactggacttatcgccgggtttaggcactttttacgtccagaaactgcccaagaatgaaacggaaaatggcatctctcaaggggtgctggtcgtctgggacaaaaatctgaaaatcgggaaggcagtaatcgttaattttgatgattggggcacaatcgacacaagtatgtatgtcacgagcgaggcaaaacgcgcgagccagattaaggcttatattgacatctatgggaatcgcaacaacccaaatgttaaatctaagccaatcgtcagcaccgtgaacgaaaaatggatcaccgaagaacagtttaacatgttaaaacaaggcgcgggggacgattttaacgtactgtcatacttgaaaagcctggacgatatcaccaaagaagacctgctgaagtcaatcaatcagaactccaatagtaattccaattcaaactctaagcctaacattaaccctaacagcaattccaactccaattctaacagtagttcaaatgcgatcgcaagccatacaaactccaatccttcatcctcaggcagtgttggaacctcgggtgccgtagtttcgagcgcatacgttggcgagtttaccaaagatgcggagtccgaggatagccagaacggtcctgacgatgccaaatcatacgaggtatccaaaagcccggccgccaaatctgcggattcaaatagcctgatttacgccttaatcggtgtcctggcgattggaattttgctgggcgtggggtacatgaaa

SEQ ID NO: 77553 - DNA, 33 bp, synthetic construct
  source 1..33: mol_type = other DNA
agcattccgagtccgctgggcgtgccaatccat

SEQ ID NO: 77554 - DNA, 351 bp, synthetic construct
  source 1..351: mol_type = other DNA
tcacatggggtagatgtcaccgcagacaccatggtggttgctaatgatagcaatggtaaaatggtcaaaagcattgccgaatcgaataacattaacattagcgtttataaattcacctctgaggatgaagttacccatatcttagaacacagtatcaacaacactaacaaacgcatactttttacggcgtaccaggagactgcgaacgatttcctgaaaaagcacccggacatgtccaatcgtatcattgtgatcgacaacgtaaacgataatacaacgctggaaggcctgcaaaacattatgaatgtgccggtcgaaaatgtgaacagtgagaataattttggcttgcca

SEQ ID NO: 77555 - DNA, 33 bp, synthetic construct
  source 1..33: mol_type = other DNA
agctttgactatcgcttcgaagatccgctgaac

SEQ ID NO: 77556 - DNA, 54 bp, synthetic construct
  source 1..54: mol_type = other DNA
attggtggcatcccgttatttaacagtgtgctgaaaagcaattccacgaccaac

SEQ ID NO: 77557 - DNA, 240 bp, synthetic construct
  source 1..240: mol_type = other DNA
tcccaatcaatcgcgaaccagcattggaccttgaatccgggtcagctggtactgtatcgtgcagcttttaccctcgaagtgtttgaaaaaataattcctctagccggtagtacgaatggccatattctgagtatgattttcagctctggcagcccgcgcacgtttatcggcgagtatgtcctgcactacaacgtttgccttacttcgacattattcgggccagtgaccctggatttcgga

SEQ ID NO: 77558 - DNA, 57 bp, synthetic construct
  source 1..57: mol_type = other DNA
gcgctgccggaattacagattacctattactccacgtttctgagcttcttttcgagt

SEQ ID NO: 77559 - DNA, 33 bp, synthetic construct
  source 1..33: mol_type = other DNA
gtggcgggtctgggcgccgatccgttagctgca

SEQ ID NO: 77560 - DNA, 45 bp, synthetic construct; identical to SEQ ID NO: 77029
  source 1..45: mol_type = other DNA

SEQ ID NO: 77561 - DNA, 33 bp, synthetic construct
  source 1..33: mol_type = other DNA
accattgtcagcggcccggtggcggtagccgtt

SEQ ID NO: 77562 - DNA, 63 bp, synthetic construct
  source 1..63: mol_type = other DNA
cagattgcgttcatctttagctattctgagagttcggcacaattagaaccgctgattgcctcc

SEQ ID NO: 77563 - DNA, 357 bp, synthetic construct
  source 1..357: mol_type = other DNA
cagcaccttaacgtggtggtctctggctcaatggaacctgccttctaccgtggcgacattgttttggtggaaaaagcggatttctttggtattcatgagtttaacgcctcggacgtcaaagtgggtgatgtcgttgtttacgacgcagcgtggtataaccagccagtgatccatcggattattaatattaccgatataaacggcactacgatgtatgttatcaagggagataataataatgctccggacccctactatgttacctccagtcaaatcaaagaaaaagtagtaacagtggatgataacttagtcgtaattccgaaaatcggttatctcagcctgtggctgcgcgggctg

SEQ ID NO: 77564 - DNA, 1098 bp, synthetic construct
  source 1..1098: mol_type = other DNA
gcgaattggaatagtttcgcgggtggcgtggatcacaatgcgttccgtgaagaaagttcggacttcgtaaccaacctttggacgtttaacatggagagccctattcattccagccctgcagtgtataaagatttcatttatgtggtttcgacccagggtattttgaaagttattaatatggagaccggcgaaaaagactgggactttgacttagaaagcaatactaactcttcaccaatcattaactcaaataaactcttcatcggcactgaagatgggattaaagctattaatatcaataatcataacgaaatatgggattatgattgtgatgatgtcgaatcgacgcccttcttgtataaagatacaatttactttggtagcgatgacggtcacctgtacggacttgataaggataacgggaaagtggtctttaataaaaaactagatggcgagctgaaatcctccccgattgtcgttgacgacaccatctatatcggctctacaaactgcaagttgtatagcatcggcacggacaaagataagaactgggaatttacgacgggcgatgaaattctgagctcgccgagttttatcaacgacactattgtgttcggcagcaatgacggcaatatttactgccttaatgaatcggatggcgccctgaactggaaagttgatttaaacaataaagtgctctcttccccgaccgtcgataatcatgacaacaacatttttatcggttctgacgaaggtaatctgacctgtattgataaccgcgatgggacgataaaatggagtcatagcgtggggggtaagattcagtcaaccccggccatcaaggataatctggttgtatttggttcggataacggtaatctgtacgtgctgaacaaatacaccggtagtgaagagtttacctataacccaggaacaatcttattcaacagcgcaattaactcaagcccggtaatcaacgggaacagtctgatatttggcgatgatagcggcaatgtatactctctgaacatcgacaaacacgaggtcccgggatcaactcaaatgtatttttccatttccgttctgatcattatcgtg

SEQ ID NO: 77565 - DNA, 450 bp, synthetic construct
  source 1..450: mol_type = other DNA
ggcatgggtggcgaaatgactgatttaccgattcttgttgtcagccagagtcacggaaacctgaccgatttgacattagatactattaaaaccacggaaacgtacaaggtaatcgaggtgattgatgatctggatgaggggaaaaaacgtgtggattcgggcgaagttaaagcagccataatcctgccgtctgactatgacgataattccacccaacaaaaatcggtcaccttgtacctggatagcagcgatcagatggcgtcccagatcctggactcatcgacacaggccattttctctcggctcagtaacatggtagcttcccagacgaacgtggaaaataaagacgcgaatatcaacccaagcatctcaaatagttttaacaacttcaaagatgacattagcctgcatattaatcgcatttatggtaatattaagtatatcgacttt

SEQ ID NO: 77566 - DNA, 114 bp, synthetic construct
  source 1..114: mol_type = other DNA
tatccgattgaaactatgccatggattcttcagaaattagcctatatctttccgctgacctacctgaacgatgcgatgcgcgggatcatgctgaaaggtcaaacgttgggcgac

SEQ ID NO: 77567 - DNA, 60 bp, synthetic construct
  source 1..60: mol_type = other DNA
atggtgtataatgaactgatcaataacataaacttaatcaacattaataacattattagc

SEQ ID NO: 77568 - DNA, 426 bp, synthetic construct
  source 1..426: mol_type = other DNA
agttcctatactattgtcaccgctgaggcgccgaacatccagggactgattgacatgcagatccagaaaatcagctctattcttaatccggaaactgttaatgaagcgttaataaaagatccaacacccatcaatatcacgaacaaaaaagatgtggcactgaaaatgcaggacttgtcgaaggtcgatggtgtgaatgttgacagtatgaacatcagcacccgtgataacccgagcaacgataaaaactttacggtaattattgaggccctgggctatgcgtcccccaattccacgagcggtcaaattattattagtcaagaaccgtcttacaagattatcgccagcgcacctgcctcgtatcgcggcgaagggataatggctgatacaaattcaatgaccatcacctcagtgctgaaactctac

SEQ ID NO: 77569 - DNA, 36 bp, synthetic construct
  source 1..36: mol_type = other DNA
atgacctttttcctggaaagctttccgggcctgttg

SEQ ID NO: 77570 - DNA, 39 bp, synthetic construct
  source 1..39: mol_type = other DNA
agttcggtggaaaccctgttgtccaacccgagcctgtta

SEQ ID NO: 77571 - DNA, 39 bp, synthetic construct
  source 1..39: mol_type = other DNA
agtatcagcttcggcaccattggtgtggggtttgataaa

SEQ ID NO: 77572 - DNA, 783 bp, synthetic construct
  source 1..783: mol_type = other DNA
tcctatgagaacataacagataaactgattaagacccaagagaaagaaaatatggaaatactgacctctgagattgtggacaacttgatcaacaatcccggagtaccagaaaaatggttcgaatatggcaaaggcaccccgggcctggcgattatcaacgaggggggtgaaattattccgaatagcgttagttacagcaagttaatctcgcttaaagaaaactataagaaacttgtagatgatcagttattcaaatctaagtttcattcatccatggaactgatcccgcagaagcggactatttcgagtgtcaaaattggttcgaatagcgaaagcaacaatatcttttcagtgaatcgcttggtaaaatgtgatttttacaaaaaatatgttctaaaagactttaaaaatgatggtaaatgtaaccacaatcacgaccaaaaataccatagttgcaattatttcaaaatttttaaaggcaacctgaaaaactcagattactatctgctgatcgaggatagcgaaaagtacgacctgaaatatattgtggatactacccgtgttgttaaagaaaaatactgggaaaacgcaatctccaacaaaatttatctgaatgataagatcaatttctacgacgatacgagcgccatcgtgtttattcatttcaacaaaccgcagtctaaggtggtgttagtcagtgttcctaaaaattttgacaaaaacaaactcaattatgattatttcattacgaacgaatgccagtttgtcctcaaagtctggtac

SEQ ID NO: 77573 - DNA, 849 bp, synthetic construct
  source 1..849: mol_type = other DNA
acgtctatcaattatattcagaataaaaacatcggcattgagagcaacgataatttcaaatatattatcgatgattatacgcagaacctggaactcaattgccgtgacgcgattgacgaagccacccaaaaagtttttaacggcctgcctgtgacgaacagtgaaaaccaaattaaaaagaacctgaacaaaattctggataaaaaaaataaagaatatgaagaaaaatacgacgtcaaaattaattcggagacattgtcggtggagaataccaaatcaccgtggaaaatccttttcaaaattaaactgaacatcaaaaagggtgatgagaaatacagcaagatcgttgagaaaaacgcgagcgtggaaggtctccgcgaccccctgccgatcgctaaactcaccattatgtccggtattttaacgtatgataatcagatccactataaaactgctctgtctacctacatgctgttacatcatttagattcgccggaaagctatatcgaagcgaccgcaccactgtacattaaaaagtgcccgtacgatccgtatatccatcatggcgaccctggcgtcattgaagactgtcttaaacatggctattttcatgaaagtgccgatggaagttgttatctgtgccggctggaaggaaaggggaaatgtccgcactacggtttggaagtgttcatacagactcacacacccctaaaaaatgagtctctttcctgcccggaccacgttgtatttgcagaccactacaacggtgaaaaaatcaatccagatgattggaacagcctgattctggattcatcccatcgcaagaagtacgggttgataaatgatggc

SEQ ID NO: 77574 - DNA, 75 bp, synthetic construct
  source 1..75: mol_type = other DNA
gcgtataacgaggaagaaaccgtggccaaggtcgtgaatgttgttaaaaaagtaagctttgtggatgaaattatc

SEQ ID NO: 77575 - DNA, 93 bp, synthetic construct
  source 1..93: mol_type = other DNA
aacgacggtagcagtgataacaccgaaatggaagccctgaaggcgggggcaatcgttattaatcatgaggtgaataaaggcaaaggcgaagct

SEQ ID NO: 77576 - DNA, 99 bp, synthetic construct
  source 1..99: mol_type = other DNA
tataacttgacctccagtaaagtggaatcgatgatcaaaccgattctggatggtggggccgacattactaaaacgaagttttctcgcgcgagcggccgt

SEQ ID NO: 77577 - DNA, 141 bp, synthetic construct
  source 1..141: mol_type = other DNA
ggcatcagtattatggaagtcgatattggcgcaatcgagcatgacatgagcccgctgtcggatctgaatttaatggcgaacgaagttgtacgcacgattataggtcgtgccaacaaatatgggcgggtgaccatgatcgat

SEQ ID NO: 77578 - DNA, 681 bp, synthetic construct
  source 1..681: mol_type = other DNA
ctcggcgcagcacatttcgaccacggcgttctctcaattgagcccaatagccgcaacctgattatctatgccgatgatagcccgcgggatactatcagcgtgcgtggcccatacaccatcgacaccgccattgaaaatgaatcgggtcaaatccgtatgccgagcgatgcgatgatgaccctgggagtcaacatcaatgacacgattaaactgggcgcgaacacttacaaagtcaacgagacccgccttggggagcctgacatcctgcgcctgccgattgaggttaaaaagctattgcaggtcgaaaatggtgaagtgattcagaacagtcgtctgaaggatgtttttgatggttctcttattacccacgcttatgaatacaacaacacaacaattaaagaaaaatattttattacctccaacgaaaaacaatcatccacatatgaaatattcctggataatgaatctatagtgaatagttatggtactttcaaggataacggaacgtacgacatctctgtagatgggaattatctgacgtcgtttagctacaaaaataacttgacgaaatcatttaaatttgacggtcatgatttagaaatcgtgtttcgagataccaactccacgagcattaaacagttctcgagtggcaatcagggcgtattcttaaactttaatttt

SEQ ID NO: 77579 - DNA, 378 bp, synthetic construct
  source 1..378: mol_type = other DNA
ggattcttcgatttcttgcattgggatgacgatagcgataatattaatgtggttgaggatggccaatattgcaccgtgaatcaggtctccgcttatattaaggaatttcataaacttccatctaactatataacgaaaaaagaggcacagtcgttaggttggcacggcgggccgctgaaaaagtacgcgcctggtaaaagtatcggtggcgacacttttactaatcgccagcacatcctgccggattcagactataaatacattgaatgtgacatcaatgccaacgggacctttcgtggtgcggaacggattgtttacaacacgggcaactataaagtgtactataccgatgatcattacaacacatttaccgaagta

SEQ ID NO: 77580 - DNA, 60 bp, synthetic construct
  source 1..60: mol_type = other DNA
atgatcattgtgtacggtaaatatagcatttatctgttggggggcatggagatgctggaa

SEQ ID NO: 77581 - DNA, 45 bp, synthetic construct; identical to SEQ ID NO: 77050
  source 1..45: mol_type = other DNA

SEQ ID NO: 77582 - DNA, 33 bp, synthetic construct; identical to SEQ ID NO: 77051
  source 1..33: mol_type = other DNA

SEQ ID NO: 77583 - DNA, 51 bp, synthetic construct
  source 1..51: mol_type = other DNA
ggcctggtggatttacagtataacgttagcattatcgaagcggccatgccg

SEQ ID NO: 77584 - DNA, 84 bp, synthetic construct
  source 1..84: mol_type = other DNA
tccatcccgagtatttttgaaaccccttcagtctcgatactgatcccgggcgtggatattccaggtagccagatttatgttccc

SEQ ID NO: 77585 - DNA, 324 bp, synthetic construct
  source 1..324: mol_type = other DNA
attggtattccgcattactttgccgaagacgggattagcatcgatcgcattgtatctgattccccttctgagggcattctcaaagaaggtatgatcttacaggctatcgataaccacaaaattaacgactcggaatcatacgtcaacattgttaaaagctttaaacccggtgataacgtaaccgtccagacgaatcaaggcagttattcggtggtgctgagcaaaaatccaaataacgactccgttggattcttcggcatccaggcagcgaagcattatgtgttgctgaatgatagtctgggcccgatcccgtggatacttttt

SEQ ID NO: 77586 - DNA, 45 bp, synthetic construct
  source 1..45: mol_type = other DNA
agccgtagtgatcgcgtgattgacaacgttgtctcgggcgaaacc

SEQ ID NO: 77587 - DNA, 39 bp, synthetic construct; identical to SEQ ID NO: 77056
  source 1..39: mol_type = other DNA

SEQ ID NO: 77588 - DNA, 33 bp, synthetic construct; identical to SEQ ID NO: 77057
  source 1..33: mol_type = other DNA

SEQ ID NO: 77589 - DNA, 54 bp, synthetic construct
  source 1..54: mol_type = other DNA
gtgatgggcaacgttccgatgatcgaaaaatattttccactgttaattaccagc

SEQ ID NO: 77590 - DNA, 90 bp, synthetic construct
  source 1..90: mol_type = other DNA
ggcggtctgtgcccgaccgatgccagcgtgccagcctatgctatcactgcgaaagcaattgcggttgcagaagggaaagtcacgatgccg

SEQ ID NO: 77591 - DNA, 33 bp, synthetic construct; identical to SEQ ID NO: 77060
  source 1..33: mol_type = other DNA

SEQ ID NO: 77592 - DNA, 54 bp, synthetic construct
  source 1..54: mol_type = other DNA
tgcaacgccctggcgtttccagtgagtaccggtccgggcagccgcatggcacat

SEQ ID NO: 77593 - DNA, 285 bp, synthetic construct
  source 1..285: mol_type = other DNA
ccggcggctgatctccctttaattacggatgaggccaaaggagaatacgttgattcgtccgggctgccatattttagtgaaatggactcatattacaaccttcgcttgaccgaagattacattgatcatggctatgtcggtgaccaaatcataaatggtagcgagtgggatatgcaccgttacgcgccgaccggcaatcagattaactatgaactgggtattgtgtatgtaacttctttcctgcatgacatctttggcggcgaccacagcgtgcgggaaatcgca

SEQ ID NO: 77594 - DNA, 174 bp, synthetic construct
  source 1..174: mol_type = other DNA
gggctcgatggcgtcacgggcttatttggcagcctgctaagtttgctgtcattacaatcggcatcccgcgttgttggcggtttcccgaacgtgcttgtgtctgtagccgaaatgcagattccaagcatgctgggaagcggtatgaatagtctgtttctggcgaacaccaatggt

SEQ ID NO: 77595 - DNA, 1008 bp, synthetic construct
  source 1..1008: mol_type = other DNA
ttaacttcggaatctgttgttccgggcaccagcgactcaatgtggaatgcaatgacttgggttaatgaaactcagagtgacgatactgtactgacatcgtggtgggacttcggctacctctttgagattgcggccgataagcaagtaaccttcgatggcggttcacagtctggcgatcgtgcattctggcttggccaggccatgaccacggacaatctggaattgtcggcaggtatctttcggatgctggacacaacaggggataaagcggttgaatccttagtgaacattaccgaggataccgggaaatccgtggatattctgattgatattcttccaatgaaatccgacgatgctcaaaaaaccctgcaaagtaagtatcacctgacggcggctcaagccaacgaggtagtccagtattcacatccgaaaaatccccgtcctgtgatatttgtcgcctctagcgatatgcttcagaaagctggctggtggagttatttcggggcgtggaactttaccaaccagagctcggaaaactacaattactatgtgccaacagagcaggtcaaagttaacccgggttccacgggtaaactggccctgctggatgaccagggtatgaccgtgaatgccgtaatccagcgcggcagcggcaacaacagcaccaccgcatataccgaagctgtttatacggatagcggcaaacagatcatggttaatgatacgccttataatccgttgaatatctcaaacctgatggtgatcgaagatggatatgtcatgaagaatcagtctgtgggaaatgtgaaagacgcaaactacaccctcctgctgattggtgaaaagaatcaatacacgccgatcctcatgagtaatgagctagcgaacagcatgttcactcgcttatacctgtatggtggagccggtcaaaacatttttgaaaacgtccatacggaaaacggcgtgatgttgtttaaagtgaactttaacaatacggcggcgggggcg

SEQ ID NO: 77596 - DNA, 6153 bp, synthetic construct
  source 1..6153: mol_type = other DNA
aatacgacgaacagttccgacatttacatcagtaacgagggtagtgatttttgcggcgacgggtctattgataacccctatcagacgcttaactacaccattgggaaagtctccaacaactcaaatatttatctgaaaagcggaacctataattctaccggttatgacattgtcaataaaagtatttcgatcaacggcatcggtgatgttactattgatggactcaatggttttatctcacaaagtatctttaaaattaactcgaatgcatcattattcctgaacaatattaaatttaagaatggatactgtgatctggacaacgaaacgccgtcttgtattatcaatcagggccggttgtttattacaaattccacctttgataactttaagaccagcgtgggcgtaattacgaatgagaattatctgtgcatcagcaacgtcaaaacaagtaatctgtccaactcgcagttattcagcgcgccatataaatataacattcctattcaattcatttacaatatctggtgttgcgatatttacaacagctcgattggcgcgtcgtataacaataaaaacatgacgctcaccaacagcttcatcgagcgatttgtgagcaataaggattattcaaaccagacttcttacgcgtacttcaacaatagcaatgttcatctgataacagcgaacgattgcgacatgctgattttcaataatacgtacattaattgctacttcgatgtggacgataccacgcacacaattgaatattccaatctgatctgggataatgtaaccctctcaaaatacaacgacctgttttatttttctctgaaaattggttattcgaacttaaccgcgatttcatcctactttctgactagcatcctgttcctgagcagcaacgccaccattagctactcatgcattctcagcaacattattacggctgtcgtgtcgaacgtaaacgttaactataattggtggggggataacaaaggcccgaacgtaatgaatggggagtttagcaaaatcacttcaaattactgggtagtcatgatggcggattatgatgatagcctggtgaaaattgacctgagtaaatatacaaacggcctggacgtctggaatctgaataatccctcgaaactgcgtactcgtctggttaaactgcgcaccgaaactggtaatctcaccaaaactagcggttatttggaaaacgcgactttctactcggaactgaacggaaataacattaatacgatgctttatgcgatggtggataatcaggttctgcgcattgtggtgggtgagggcaacagcgattatgacctgtatatctccgatacggaaggtaacgattatttttgcgatggctcgctggagaacccgtataaaacccttaaaaaagtggttagcaaggccattagtggaaataaaatttatatcttgccgggctactacactctgagttggaacgccaacattaaaatcctcaaaaatttaacctttattggtatcggaaatgccaccctgagccgttccaatgcgcgaaatattttcatcgtgcaagaaaaaggggtgttgaatatcgaaaatctcaccttcacccaagcgacgtctggctatcacaactactatgatccaataatccatgtaattgacggcgatgtcaatcttaagaacagtaacttctataacattacaacgtatggggttgtgttctcagacaagtccgaacacgtgactgttaataacctgacgcttctaaacgtggagggtccggtggtcgtgggcaactctacgaaggtgtccatctacaattcgaaatttttcaacggcagtgaagcatccttttacgattcctattactcatttctgatccccgtgtgttctaacttgtctgttgtaaattgtacggttgacggctacaaaggtggtttaattaaactaaaccctcgctatgagcagatcgctgcccggtcatatatttataactcaaccttcctgcgcaactatcagtataattatgtgtacgcgccgatggtgtcaacctatagctataactacatgaccggcttttcaatcattgaaaactgcacgttctgcaacaacattgggaacctggtttttagtaacatcataaacaattgcaccttcgtcagcaacaaaaggattcgttatgaggaaactaacatccattacaatgtcaactaccccaaagcgctaatttatgccaaaatcattattaactcgaacttcaataataattcgttcatcagcaaaaactatgaagacatggtcattcatggcgatgaagtttattattcaaccttcatcaataattcggcagccttcggcggtgccctgtctggtagcaaagagatccattacagcatctttatcaacaactctgcagcattcggcgggaatgatgtattcgtttataatggggacctgaattgctctagcaactggtgggggtccaaccagaagccggattccagccgcgtttttgtgttcatcggcacattggtattggacgactgggtgatattgactatggattataagaatgaccgcgttattgcatacctggacaacctgctggacaacaacggcaacagttaccctttaaaccatgttctgccatcgcgtgctgtgattttttcaacggaaggtggagagctgacgccgtcgaacacttttttggttaacaacaaagcaagcactttcctgattagattaacgtctagcgattttaatgtctttgctcaggtcgataatcagattaccagtttgactgtgtacaataacacgacccaaatactgatgagtaatgttgtaatctatgggaaagatgtattgtataatttgtctttgatcaatattaatggacataaaattagcaaccaggatctgaatgtgatcattacgcacaaaaattcaattattgattcatttattgtcaccacagacaaaagtggggatgcaagctttagtgtcgattacgcaatcggtatttatcaggtgaatgttgtatatttgggaaacgggtacttcgaagagtgtaactcgtccgcgactataaacgtcagcagcattaaaacgaaacttcaaagctataaccagacctactccggtaaaaataataaattttatgccatattggtcgattatcacggccgttacttgctgaaccgcgatctgattctgcgcatctttgacttaaatgacaacctggtgaacaccgtggatgttaaaacaggtgtgggcggccgtgccgacgtgctgttatctctggatgtgggcaattacaaaatgaaatgggattatctgggcaatgaatggtatgaaaagagcacgtgtatctcatttgttacaataagacctatcgaaacgaatatcatacttccaaacacaacactgtacggcaaaggcaacgactatgagttcacatttaaagatatgtatggcaatctgatttcgaacgagatgattacctttaaaataagtaaggaaaatgaatcgagtaaatttagtcttatcaccaagaaaggcattgcatcaatcaatattaacctacttccaggcaaatacgacttagaggcggtgtatgccggtgataaagtctacgggagcagcttcgcgtcggcaattctctatgtggaacccatcttcgtcaccatgaaccacaactcttaccagtccctaccgaaaaatggtgttttcacggttattctgaaagacatgtacggcactaaagtaagcggcgaaaatctctcgcttgaattaattaacaaagatattcataaagtttacgaggcggtaagtgacgcgagtggtcaggcaaatttcaagctggacgcgcctgaaggcgtgtattttgcgctcattaattacggcggtaacatttggtatggtagctccgttagtgcggtgacgattgagataaattctaatgtgccgattaatccggtgtatattaatggttcgaacctggtacagtattacggtgaagataaatattatttaatcaagttcaatgatacaaacgcctatagcctggaaggcaaacttgtgaatgttttaatcaacagcgaagactggagcaactcatacacgcttgaaagcaacgtcttcggtgaagcgcgtatccaaatcgctttggaaccgggcacttataatattacctacaattataaaaacgaatattatggcctgtttgcgcaaaattccagtactatatttgtttacaaaatgcctacaagcttaatcgcaagcaacatgatcttaaagaaaggcgattccaaaaacctggaagttaaacttgtcaacaaaaacggcgatccaattgcgaacctcccggtcattatcaagatcgatgataatgagtataatatcacgacgaatcaaaaaggaattgctaaactgcttcttaatctggatttgggcacccataatgtgacctattcattcaataataagaattacatatcttccaaaggtaatgtcactattctggtggttaacgactcgaaaaaaaccaccaccctggtcggcaatgatgtgtacactcgtgaggatcaaacgatcaactacacggtgttactgagcgacctgttggataacccgatctcatcttctgaaattgttctcaaaattattaattccgatgatattaatatcaaaacatataaaggatatacagatgtaaatggtgttgctacctttaagtttaacctgaaattcggtaactattttgtgaatgcttactacaacggcaacagtgtaaacttacctagtttcactactaataatctctacattaaagtgctggaaaactacaccgagacaatcctgtttggaaacgatatcgaaattcacaatggtggcgatgattactattcagttgttttaagcaccgttgacggggaatttattaagaaccagatcatcgaatttatcatcaaaaacaacagctactttaccaacaccgacgaaaacgggatagcctatctgaaaatcccgttttctccaggttcttatgaagtcctcacgaagtttcatggttgcgacaatctgaccagttcaagcatccacaattatatttccatctatggagacctgttcaacttttactcaaaagacgtggtgaaagcctacaacaatggtacccattactacgtggcactgtatgataccaacaacgaaccgttgtccaataaaaccattaatttctatgtaaataatcagacctaccaggacgttaccaatgcggatggttttgtgtgttttgaagtatggttaaacccaggaaaatacatcattaatgccacttttaaaggcgaatatccggatgaatttacgagtgtagtcaacaacatcaccgtcctcccgaccatcatgggggagaacctggatgtgtattacaatgaaaacaccgtatttagcctatttctgctggattataattgtaaaccgctcgaaaataccgaagtagtcatcacaattggtggcgctaaatattcgacgatctctacgttcggttccgccagttggaaactgaaattaaatgcaggggtatataacgtgatttgtaagaacccgatcactaccgaaaaaatcacgcgtaaaattaacattaagtccaccatcatctcgaaaaatttggtcaaatattataaagggtcgtctaaatttagcgtgacattcaaagatcgcttcggtaacttttctcgcaacagcaaagtgaaatttattattaacaagaagacgtatgtcaaaaccaccaattcgcggggtattgtgtccctgaacattaatctgaaaccgggcaaatacaccattaaaacgtataatctgaagacgggtgagattaagaccaacaaaatcacaatcaaaaccctgataatttccaaaaataagaaagtaaaagctggtaaaaaaatcaattacaacgttaaagtcttcaattctaagggtaagattgctaagaaggccacaattaagtttaaaatcaaaggcataacttacaaaatcaaaaccaacaaaaaaggcatcgccaagttaaacatagtgcttaaaaaaggaaaatacacccttaaaacctcgtactttgggctgagtgttaagaacaagataacggttaag

SEQ ID NO: 77597 - DNA, 5574 bp, synthetic construct
  source 1..5574: mol_type = other DNA
gaaaactcaacattaaatacctcgattaagatcaacaacgatctgaatcagataaacttgggcaacgaaatcaatttaatcgatgaggcgccaaaagaggtgctgcaagacgaaagtgaaatttccatcacgccgcagaactataacaaatactttaacgtctataccggtaaattcaaaagcgatattgtctcatcgaaaatcacgacggtcaaaataggcaacgtgtcaaaatgtttattcgcctttgaaaagcctgtaaatttaatgccgatagattcgagctgtcaaattaccaatggggtaatacatctgttgccgggcagcgacggatctaccatctccggtctcaagattatcaataacgactctgtgggggacatcaagtacggcggcattctgattagccgtgcgcatggcatctggctgaccaactcaagcaataaccttatctataacaataccatcatcatcggcaatcaaaagggctgttatgccatgcctatgggttattcgaataacaatcgaatcttaaataacacgatcattagcggcctgacgagctgtattgtcatgggccgctcctgctataataacatttctaacaactatattgaaatttgcggctatgagcttttcactacctctaatctcattttctttaacccgtggggccatgcagattatgatgacggcgtagccgagtgtaatggcaactatattgcaaataactacctcaaaaattatggcacgggaatttgggcgatcaccctgtctcttggctactacagcggagatacacaggtcattaataacacaattatcaaggggtcctcaggcatttcaacgagtgatatgctgttcacccagccaaaaaacatcctgataaaagataatacttttattgattgtccgatcagcatcctgacctgcagtaataatgtcacaatcgaaaaaaacaaaattttcggcagtagcgaggacaatgcaatctacattcaggctaacgatgcgcagttgtataatcacagtgtaactatttcggataactatatagaatttgaaaacctgggttgtgcgatcctcgtccatagcgacaatgtaaccgttgttaataatgagattcacctgagccgttatggtacgggcattggtattagccccaccgattttcctaaagcaagctctaataattgcaaaatagaaaacaataaactgtatctcagtggcgatatgggcattcgtatactgggacataataccaccatctgcaacaattacatctcgaccaaggataaaggcattgtgatttcaagctcgggttacaaaatctacaacaacacgatcattgcaaacatcattctgagtgatgacgtgcccatctatatcgaaggacacgtggtaaactccaccgtaatgtataacgaaatcgaaactaataatagtgaaggtatccatttcaatcctagcggtgacctgagcgactacttcggcaaggtttcggagaataccatcaacggcattatcgaaaacacggagacgatcatcgttaatgataccaacttctatgactacttcgatttatcaggatatctgaattatgagttcaaaccaaacagcaaaaagattatctttttcaccttcctgacgaataaaaacatctatttcacagacaaaatcttcctgagcagcaataaaatgtacaatctgttgcacaacgtttcgattaagttttttgagaacgcgagcggctccctgattcaagatttaaatttctataacattgggaacaatagcatcatcctggatggggtgaacgatgtgtccattaataacaatgactttacaattctgtcaaacaagggcaagaatatctccaccatttccgtgattggtggtgaaaattgcatcatctcgaataacaatatcttcatgaactctaaaagcaatttcacgaccgcaatttctatttccaatccgaacggtgccataattaaaaagctgtcaaaaaactttaagatttttaataataacatcctgattaaaaccaacggcatcgcccgtggcatttatgcggatagccttgtcgagaccaacatcctggaaaacaagatcaacattatctctgactcttcggcgtacggtatctcaatcgaaaacaccaatgagatcgtgtataacatcactattgacaataacttagtggtgattaattctaaagaaatgagttatctgatcaaacttcagatgattggcactagcgacatcatcaacaactatctggttggtagcagcaacggcatttgcggtattggcgcttacaattcattgaatctcaatataaatcgcaatgaaatttctatttcaggcaaaaagccaattaacttcccggtgtttgatgaattaggtcgcaataacgtggcgatttatctgaaatccaccgtaataaacggcttttcacgtaacatttttgacattgaaaactcaacaatattgattaaagactcttcctcgatcattaaaaacttcaatgtgaatagttatgttattgccgattataaccacgatttttatttcgattctcagaacaaactaaaaagcaacattattaatgataacagcataattctgttcaaaaacttcacgtttaaaaaaataaccaacattaatattccggtcatcatcaaaccctataaaaaccttaataacttcaccgcgacactgatcctgtcggaaaacgctaacaaaagctcaatttacggctttaattttattaatgcaaacattaatctgaatggtgtggacaatgttaacatttttaacaactcgttcaaatgtagtgaaattacggataacaatggtttgaataatatcatctttaacaattcatttgaatttaaactgaataatgcagatggcattatttttaacggctgcgcgggcggtatttttacaaataattatattctaattgactcgaaaaaatctaactttattcttattcggaaggcgaacggaactaaggtgaataacaactatattaacgcgacgggcgatagtctggtactcattaaatccgattcgagcgaaaacactcaaattctcaaaaatatcattaatgtgacaagcactggcgattttaatgtgtataatgcgtttaaaacgcatttcgataacatttcaaacaacgaaattaaatgtcgcggtacctcaaatagtgcggtaatttactatgattcgtcatcctcatgcaacaaaatcgaatttaatgaaatcatttcaagctcgagtaacggtcgcgaatacgccgttgtctttgataccaaacacgctctgtccaatacgattgcaaacaactacctgattacgtcgaacgggtataggcgcggtaacgatgccgtctacgcaatctttgaactggtctgcaataacacgccggtcactatctatgtatctattaatagcacggaagacggcaatggtagttttaccaatccgtatctcaccatccatcaagccctggagaacagcctgagtggcgcgataatctacatattaccgggttattacaaggaatcgaacctgattgtgaataaaaacattacgctgaccgcaatcaataatgatggcgcggtttacattgatgcactgaacaatcagttatttaccatcactgaaaagggcagcttgaccatcaacgcactgaagattttcaacggattttccgtggaaggtggaagcttgttcttcaattttggttcgctgattatcaacaactcagttatttacaatagttctagctactacgataactcgaacccaacctttaaatttaccaacatccagacgccaactctttcatacagttacgactgtgaaaacctggggctcggcggggcgattcttaattatggtaatttactaatcaactcatccaccctatttgataactttgcgcacaaggggggcctattggctgatttcggaaaatcaacaatcaaaaacagcctgatatttaataacactgccgtgcatggcggggcaatctttacagactcctcgcacgaatttaacattgagaatagtagcttcctggaaaatctggctattcagacattggactactgctatattcagagaaaatcgttagattctgggggttatgagtatcgtagtctctgcgatatgcggccgggatatggtggcgccattttcagcaactcttcccttatcatctccaactgcctgtttgagcgtaatattgcgaaaagcggtggcgcaatcggtcactactcgaaaatcgaattgaatagtaatcgtcaggggcctaattattacgcggttaaccagaacgtttatagtcaatttcgatacgtgccgaaattgaagattgaaaattcgatatttcggtataacgaagcaaaagataccagttgcggtaacctgagtatgatttcggatcgcatgtataattattactacagcatcaactataacggtggtgcgatttttggttcgctgagccaactgacaatctttaactccctgttcgagcataatgtggcaaacacggttgggggtgccttatgtgtgcagtgtgaaaactccgtaattgagagttgcaagttctacaataacactgctggggaatatgggggtgccattgaggcgttcggtacgtatcgcatctttaacacggaaatacttaacaacaacgccaaaaatggtggcgcgatcaaatacacttcatataactcttatggccacttacaggaaatgatgagcctgttcaatgtcaccgtgaccggaaacaaagcgctgtcgagcggcggtgccttcattacccaagtggcgaattttgccatcactaattcaaacatctatgataacagcgccccgtacggtaacacgttttacggcaaatacgggtacgacagtagctccaatattgacgctcgtaataactggtggggctctgttgacggacctgacgattccgtttggaacagtgccaacagtaaatttaaaaattggttgaatgagaaagtaaactggcatgttccgcatgtgagtggcggaagctctaacaatgacgagtctggtattggaaaccagaacaatggtgttaattcctacattccctctagcgtctccactggttcgggggtccataccgggagcacactcacaaacaatgtgaaaagctctggtgcttcttcaaaagggttcagcttcactggcaattggccgagcggaaccgcaaacggcttcaacaatggtgggtcgggtgagggtaatgctgtcaattccaaagataacagcggaaatagtcgcacgtcgattgccggcaatgttaaaaacctgaacagcgttagtaaaatcaatagttctaacgtgaataatcttttttccgtggggatggacgccaatgctgccgatagctccgcgagttctgcttcatcctctcaggggggggctgatgagagtttttccaatgcctacgaaataattaatgaagttaaaaaagaaaacaatcagaaattttccatctttaatatcttgcttattatagcg

SEQ ID NO: 77598 - DNA, 5184 bp, synthetic construct
  source 1..5184: mol_type = other DNA
gcaagcgaaatcactttgaacgcggacaattcgattgatgaaatctctaacgaagatatgggcatcctgaacgaagttagcccctcaaacgatataaagcatatctatgtcaacgataccggggatgatagcaacatcgggtcaattaatagcccttattcttccataagcaaagcaattggcgacgtcaattcgtcgaccaacacaacgatctatctcagcaaaggaacgttcggcaagaacaatgacactaattttcagtttacaaatgaaataaatacctattttgacaattgcaacgtgacttttattggggagggcaccgataaaacatttatcgatggtaaatcaacctataaattcatgactatcctggagatcacgccgaatttagtttttaaagatattacgtttgttaattttcgtggacgggggagtagcgtttttgaacttttggaagccggaaatctgacaattgataactgcgtttttaaagatagctattcgacgagtaatggtgacaccatcagctcttcaaacagtggtgacctgaaaatcattaattcgcagtttatcaactccaacggtggcatcattagtttattatacgaggatgtatcgcccggcacgctttacctggaaaataacacgtttgtcaatattaccaattctgaaaataacggtatcgccgttaccagcaactacgctaaagcagtgatcaaaaataataaatttaataacatcacttgcattaaccagaaccaagtgaccctttatttagaagctcccgatgagggtacacttgtgctgaccgataacaactttgtgaactgcgagtgcctgaatgaatactttatggcgccggtatatttgtgggcctacgaagaatatgttatcttcgaacgcaatatcttcctaaacagcacgggcgcgtctggcttcaacatcttgctgaatggtcgtatggataatctgaatatcagtataggggcggacgagattaatgtgcacaacaatgaaattaatcacggtgtaaatattccaattaatataaccgacgatgtgggaaacttggtgctgattaatagtggaatccagctgaatcttattggtgacaataacaattataccccatacctaagcctgaaaaacaaaaaactcacctttgcgacggtgcctgagagtggcatttacaatgtcactatcacatacaacgatgggctatcaaccacggaagtgttaaccatcataaagattaacatcagcagtagccctgttaatatttgggtctctccgaaaggttcagatagcaacaatggtagcgaagaaaacccttttaagaccattcagcatgccatagatacgggattcgaaaaatcattcaatgtcatcatctatttagacgaaggcatttattatggtgagagcaatgtgaatctgatcattacgaataaaggtagtctgcaaattatcggcaaaaagtataacaagaccattattgatggggagcactccaactggtttttgagtgttgatacgtgcgatgttgaggtgaaaaacttaaaattcatcaacggtgcgggcaacaagaacttgatctcggggtcaaatctgcttaacctcaaagattgtattgtagacagcaacatcgcgtcccgcaactgttatgtgctgcaccagacactgttcgataatttaacttatacaaacaacaccggtaccatttactacaactataatcgcaatattaccaaatcaaactttattaacaacaaaaatatctatgatagcaccgggattatctacagtagctgggctccgatcattatcctggattgtaaattcattaacaatactgccctgtacgactacggtgtcatatactctaacaacaacattatgagtcttaacaactactactacggaaacaaagcgaaaaactatggcatcttctacgcctcgtcgtattcgagtaataaaatgattctgataaatgatacatacattaataatcacgtcgatggctcatacggcatcggaatctccccctattcctctgtagtaaactgtaaattcatcaataactctgcgggtaccgatgcgggcataggtagtataacaattacctgttcctttaaaaactgtagcttcatcaataacagcgcgactaagggcggtgtgtttgtactgaacgcggtgcagcatgccttgggcaccacttatgaagaacttatttcattcgacaacgtcactttcgaaaataacaaagctagcatgggggcggatatttacctgcctccgcgcagctcaaattcctattactcctacacatatcctattgagctgacgattacctttgataatattaccgttacctccctgacggataacctcacggctagtgtttatggagttaacggcataattgttggcggtgccattctggagttctatctgaacgagctgtatattgggtcttcgcagatcgtgaacagtaatgcaattctggagtatgacgggtttagtaatggaaaagcgattgttaatggcaacattattcacccctcggtcaagaataatataaataacgccacactggacattaaactggacaacgtcctgaatcatatcgatttctgggtgtcaaacatcgggagtgacgaaaacggcgacggtagcaaaactaagccgtttaaaacaattcaatacgcggtgaacaaagcattcgagaactgtcgtgacattacgatctatctgggcgaagaaacctacagcggggagaacaacaccaatctgaccatttccagtgccagcaatataacaatcattggtaaagggattggtaaaaccattatcaacggtggtaatagcagctattttgtaaaaattctcatcggcattaacaaaattattattagcgatttgacgatcattaacatgactccggacaaccgttttgatctgccgattggctctacaagcccgagcggcatacatagtattattaaaagtggttccacctcaccaatcaccgttgacaagggcgcaaccctctatttaaacaacgtaaacatcaccgaatgccgtggcggtaacgcgatcattgatggtgaaggcaacattttcattgataactccatcctatacaaaaacggcgttagcaagggcatcattaaatgcgaaaacttagtaattaataattcaatcatcgataaacatctggttggagggtatccaataatcggcacgaacattatcataaataatactaaaatcaccgatgtctttaacatcattcgtaacggattctattttatctccaacgcgaagaacactacgatcgagaacacatgcgttctgattaataattgggagaatccactgaacatattggacattattgagtattatgatactcaaatctgtccggccgcgtgcattgctagcaccaatgccatcattaaaaactcatcctttaaaaacgaatttgaactggtgtacctgtggcaatccacgacggattattcctatcataatgtgtactccggctcgaatatcgaagcagtgaactcttcattcgaaggttatcagttcatcatctactcgcggatgctgcagaacccgatctataagttcgatggctgcacctttaataatatcgctaacttgatgattatgatgcaatctcgcaactctatcgtctcgttttcaaacagcgtaatgttcatttcaggcaataaaattgcaagcaacaacgcctttaataactctttcctgtttaacaacaattattggggtaataacagcaagcccgtcattccaaactctgtatcgaacttccaaatcccgtctccggataattggatcattctgattagcgaaggcgaagaaccagtctttaagcttacagatgggaaaaatgtcactgagtatatctgtaacttgccagctaaaatctcgtacgtggccgatgaaaacggggaaatcattcctgtgctgaatttaaacggtaatggttataaatttaacgtggatgaaaacggtaatgtggtgctgaacatcagtgctccgatgaaaaacattgtgcctaaagtgccggttgacgaaactgtattcgcaaatgatattgaagttattgtcaactcgtcttcgaacttcaaggcgaagttcacgaataaatggggcgactccctgaaaggcattaacgttagcttcatcatcggtgagaatattatcaatatcattaccaatgaaaatggcacggcaatattgccggttgactttgatctgggcgtatattttgtgaaaattgtgaatccggtgacgggtcagtttattttcaaaacgattgacgtgatccttgaaaacacggttacggcaaacgatattattgtcaagtacaatgataagtcgaaattctctgtgatttttaccgacaaatttggcaacccgctcattaacactaatgtcaaatttaaagtaggcaagtatattatcaatcgcaccactgacgaaaatggtattgcgtcatttgttatcaacttcaatgttggtaattatgcggtcaatacgattaatccggtgaccaatcagagtatcgacaaaatcattaccgtgaataaaatcgctactaagctgacgtcgccgaaactgacggtaacgtataatgcggggaaatacttaactctgattttaaaagatttcaatggcaaagcattgattaatcagaaagtttctattaaaattaacggtaaagtgtacacgaaaattacgaactcgaaaggacgatctagtctgaaaattaatctcccggtgaaaacatacattacaaccctcacctatgccggagacaggaatcatattaaatccagcgccaccacgaaggtgatcgtgaagaaagccaccccgaaaatgactgcgaaaaaagcaacgtttaaactgaaaacaaagaccaagaaatacagcattattctcaaggataaccgttataaagtgatgaaaaaagttaaagtctatcttaaagtcaaaggcaaaacctacagagccataaccaattccaaaggcaaagcaacctttaagattaccaaattaaccaaaaaaggcaagtattcggctcgcatcaaatactcaggtaataaatactttaattccatcaccaaatatgtaaaaatcaccatcaagcga

SEQ ID NO: 77599 - DNA, 1008 bp, synthetic construct
  source 1..1008: mol_type = other DNA
tcactgctgagcaatgcgaacgatagcttctccaaagcggagccaaaagggaatgttagcatagctatcaccggggatgttatgttcgcgcgtaacatgccgggcgtcttaagtgcggattcaagccctttttcaggtgtcagtaatgtaacttccaacgtggatttactgctgattaacttcgaaaatgcggccactagctctgaaaatgccgttaagggtgatgtgccgcttaaatgtgacccgcgctatgtgccacttgccaaggggaacaacaacaccatcgcttcgcttgccaataatcatgcattcgactatggtattgatggtatgaaggatacaattgaaaacctgaaaaatgccggcatcacgcccatcggtgctggcgagaacgaaaaaacagcgcataatgccgtaacccaggagattaacggtcggaacattaccatattaaattatatggattcggacaactttgccgaatactcttacgatgtcatgccttatgcaaatggctcgaatccgggttactccgtgtttgacctcgcagatgcacaaaaacagattaaagaaaacaacggctcggacttgattgtcgtttatatgcactttggaaatgaatattcaaacagcccaaatgacaaccaggtcaaaattgcgcatgaactgatcgattctggtgcggatgtggtgctgggatctcaccctcatgtgacccagggcatcgagatgtataatggaaaaccgatcttttatagtttgggcaacttcatctttgaccagagtaaccccgcaacgcacagcgcttactttgtgcaaattgacctcgtaaataacacgggcgaatgcagtgtttatccgattgtaatttcgggctacctgccgcattacatggactccgatagcggtaactcactgctgaacgagttgaatccgaatgcggatgaactggaagtttccaatggcgtggggaaactacgctttaacctgacggaaggcgatagcaat

SEQ ID NO: 77600 - DNA, 1710 bp, synthetic construct
  source 1..1710: mol_type = other DNA
agtgagatgcaacaagtgaataacgatagtgttgactccgcgaatcagtatgtggaaccagtgaagaacgcgtcttttagtaaggtgagcaatactaactacctgaaggattcaaacttcaccgtaagcttaaaagacgagaacaatgaagtcattgtaaataaaaccgtttacttcactattgatgatggcttggtcatcaacaccacaaccgacgggaaaggcagtgcaaaactcctgttgaacatctcaaaaggaacacacaccgtcaaatacatatttaatgaaacgggatttaccccgtttaaatctagcacgaaagttctggtgatcaccacatccaactctaagataaaagcgtcagcttataaatcttacatcggctttaaaaaacattattcctatgcgaaacatatcagctttaaaaatacctataagattacactgaccgcggatggcatcccgctgtccaaccggattgtgaaatttaccatcaacggtaaatcttatagtaaaaaaacagacagcaaaggggtggccagcctgcctattggtctgaaggccggccgttatcccattaagttctcctatgcgggtgaaaaaaacattaaaaaagtcagcggcagctcgattgtatatgtaattaagggcatgcctaaaaagatcattaaagcaaattcactgacatataaaaacaaagttagcgccccgtttaaaatcaaattagtgaatgggcgagggaacatcctgaaaaacaaaaaagtaacgttcactctggatggccgcacctataccaaatacacggacaacaacggtattgccaccatctaccttaaattgagttggggaacccatagtctgaaagtttcatcagccaagaccagctactacaaatcggttcttaaaaaatattctatccacataaaaagcaaggcggttaataacggcctgtggatgttcagttcggatatgaaaaaagcaaacctggcctcccttaaaaaggtgggaacgaaacatattttcctgtacgccaaagcaattgatgtgtggggccgctcggatgttgagaaatttatcaaaacggcctcgggttatggtattaaggttcacctctggatgaaagtgtttaatgacgacaatgataaatggattaatccggtgaaaaagggcaaaatcaactatggtctgatcaaaagcaaaattaatcttgcgaaagaatacgcgaaagtcaagggggttgcgggtatccattttgattacctgcgttatcccggcaatgcttataaatactcaaacggtgtaaatgcaatcaattactttacgaaagctgcaacgagtgccattcacgcaattaatagcagattcattgtctccgccgcagtgatgccggaaccaagcgatatgaaatattactatggtcaggatatttcaacgatgggcaagtgcttggacgtcatcatcccgatgatttataaaggcaactataatgcgggatcttcctggattcagaaaacgaccctaaaatttgtcaaaaaaagcggtcatgctaaaatatggtcgggcatccagacttaccactcggatcgttcgccgattaagctgacttcctctgctttactgaaggatgcggatgcggcggctgccggtggcgcagacggggtgattttattccgctatggtctcactaacttgattaacttcaataagtta

SEQ ID NO: 77601 - DNA, 1467 bp, synthetic construct
  source 1..1467: mol_type = other DNA
gatagtgatcataataagacggacgattccattctgggggaagctgatacgagcacgagcagcaacattacgcgcatcggtgtgaatagtatctacgatgacggcgtaaacgagacaatcaaaactaattcctcttttgtaagctcgaacgtagtgacgtatgagaccttttcaaccaaaataacggtccgcctgctgtcgaataacaatccactgaacggaaaaaacattatcatttctgtcggtaatgttagctacaataaaaccaccgatgccaatggtaaagttgtattaaacgtgaaactcgcaaagggaaagtacaacgcaatgttttcttatggtggcgacgaaaacatcaatccgtgtcaaaaaaccactaccgtaattgttaaaactcccatcaaaaccaaaatttattgtgcagataaaaacattaattatcgacaagacctcaagaacaccttcattgtccgtctgattgatgggaacggaaaagctctgaaaagtcagacggtgacttttaaagtcaatggtaagatgtacattgcaaaaaccgataaaaagggttatgcggaagtttgtttaaacctgaaaaaagggtcgttcacggtcggattctccttctacaaaaaaagcccgtatagccatagccacggaagctataaaataaaggtgaaagcgccaattggcaaaggtaacgggtattggctttggccggcccatatgaaacatttgaacctcaagtccctgtcaaaacttggcacaaaacatattttcttacacgtgcaggcgattagcgtgtacggcaagtcttcggttatctcgtttgctaaaaaagcacaccggtatgggattaaagtgcacctgtggatgcaggtatgctgcattcgcggggacaaatgggtgcgtcctgtgaacaaagacggttccttcaaatactcatttataaataaaaaggtcaaagaagccatcagttacgcgaaaatacccggcatcgacggcgtgcacttggattacgtccgttttggcggcactgcgcatttgtacaaaacctctacacagtctattaactatattgtgaagaaaacaagtctgggcatccataaagttaaacctaattgcatcgtgtctgcggccgtcatgccggaaatctcaaagatgatctcgtggtatggtcaggatattccgacaatgggcaagtatctggatgtgattgttccgatggtttataaaggtaatttcaatcagaaaaccgcttggatcaccaaaattgtgagtaaatataaaagccaatcaaagagtgcggtaatctggggcggtcttcagacctaccactcagacaataacgttaaaaaattaagctattccgccctgttgaaggatgccaaatccagcaaagccggcggcgcgactggttcgatcctgtttagaattggcctaacgcattacctgaactttaaaaaggtt

SEQ ID NO: 77602 - DNA, 93 bp, synthetic construct
  source 1..93: mol_type = other DNA
agttccttcacatttaattgggggaccgacacggcctcgtatttcgtgaacaccgttggcggtagctctgatctgactaatgcgaacttttta

SEQ ID NO: 77603 - DNA, 72 bp, synthetic construct
  source 1..72: mol_type = other DNA
accctgccgggtagcgtggttgggatcaacgcgttgattcatccaaactggaatggcctgttaaacgtcaat

SEQ ID NO: 77604 - DNA, 108 bp, synthetic construct
  source 1..108: mol_type = other DNA
ctgggctatatgagcttcatcaacggtacgccgataaccgatctgattaccgaaggcactggtttagtgtttattgtttttccaatgatcttcaatattatggggagt

SEQ ID NO: 77605 - DNA, 48 bp, synthetic construct
  source 1..48: mol_type = other DNA
ctgtccattaccacaacgaccagcgagttaactgtgaacgcggaaagt

SEQ ID NO: 77606 - DNA, 360 bp, synthetic construct
  source 1..360: mol_type = other DNA
gccgaaaccgttactatcggcggctttgattttaatgttccggacgggtttaccgaagataaaagtcacgaaatcgtaaacatggagaaggagcagggtggaatcaaatacattaacaacggtaaactgttcgaaaacgacaaaggggatgtggtaaatattttagttgcaaaatatgatggccataaagtgaccaacaaaattgcgaagggtattgctgacgaaccaaaaacgatcggcggtgtcgatggttacattgtgcataatggcacgtttacaagcttcgactatgcgaaagaaggcaagctggtcgtgattactaccaataatgaagatgccatcgagggattcattatagag

SEQ ID NO: 77607 - DNA, 558 bp, synthetic construct
  source 1..558: mol_type = other DNA
ctgacctcctccaactcgcaggacaacagcaagataaccattatggggaacggatcaattcatgaaaacggcactattggcattaaactcaccaatggtgagaacacggcgttaaaaaataaaacggtccacgtttgcgtgaaagactccgaaggtaaaatcgtggtggataaaaccgctaaaacctatgtgaacggcgttgttggcgttcgcttgacaaatgtgtcggcgggcgaatacgatgtcaacgtaacctttgaaggtgatgaaaattacacttcgagtagtgtatctcaaaagctgaaaatcatcgccggcgaaagcgatgatgacccaacctatcctgtcgacgaggatacggtaaccacgacagccgatgcaagctcgactcagtcaagccagtcctcatctcagagccaatcttacacgccgagtcgttctaatgattatggcgggagcagcagcagtgatgacgatgggggtcttgatgcagactatgatgagaatggtaacgaaatgctgccgacagtcgacgaagagggaaatgaagtgtcaaat

SEQ ID NO: 77608 - DNA, 393 bp, synthetic construct
  source 1..393: mol_type = other DNA
aatttgaaggatttcaaagccaccaaaatgcttaagaaattaaccaaacaaaaaacactgactgttaagatttacaattttaaaccgggtgtcctctgggctccaaaagcgatcaaactgaaaaacggcgatgcaattgccggctacgttgagtataaaggtaacatgcagtttgaaaaaggcactgggatcacgtcctggtacatcggcagtggtctggatggcgacatcgaacctcaccataccaaactgattaaagcaaaattcttctttaaaaacaaaaagggtaaggtaaagaccaaaacggtgaaaggaaatggcggtggacatatttcgacgagcctgataaaagggtatgtgccgtataaagcgaaggtgtcttataaaacatat

SEQ ID NO: 77609 - DNA, 69 bp, synthetic construct
  source 1..69: mol_type = other DNA
agcaacctgggctccaccccagtcgtggccgtaccgtatgcgattagtttaatcacgtcggttgatctg

SEQ ID NO: 77610 - DNA, 33 bp, synthetic construct; identical to SEQ ID NO: 77079
  source 1..33: mol_type = other DNA

SEQ ID NO: 77611 - DNA, 33 bp, synthetic construct; identical to SEQ ID NO: 77080
  source 1..33: mol_type = other DNA

SEQ ID NO: 77612 - DNA, 318 bp, synthetic construct
  source 1..318: mol_type = other DNA
actccgagcattgaagtcaaaaagattgacattaaagatattacgcggtcaatgattgatgagaaggtatcggttcgtggcatcattacagatatcaaagaatctagttccaaaacgaactactttttgaccataagcgatggtgaaagtcgcattacccttattatctttgagaaacaggtttcagagattacttctcgtaacctggatatcggggatttcaaaaataaaaaggtggaagtggtgggtaccatcaccgaatataaatccgacttagaactcatcctgtcgagcggcgacagcctgcgcataatcaat

SEQ ID NO: 77613 - DNA, 147 bp, synthetic construct
  source 1..147: mol_type = other DNA
ctgaaaaacagcaaaggcaaagtattaactgggaaaaagattacagtcaactattctggcaaaacgtactcacgcaccaccgattccaagggttgcgttagttggaatgtgcagaaaaaaccgggtacctattcggtgaaatttacg

SEQ ID NO: 77614 - DNA, 261 bp, synthetic construct
  source 1..261: mol_type = other DNA
caaaccagcagtaaaaccgccaaagtcacggtcaaagcaatgccgacatcactgacggtgaacaacctggctttcacctatggtgacggcaacaataagctgaaggcgacccttaaagataaaaaacgcaaagtgttagtaaataaaactgttgtgtttaatttcaatggcaaaaactataatcagaaaacaaactcgaagggagttgccactttgaccatcggggcgggtccaaaaaagtacacgaccacgatttccttt

SEQ ID NO: 77615 - DNA, 225 bp, synthetic construct
  source 1..225: mol_type = other DNA
aaaaagacagttacggtgactgtcaattctattccgacctccctgaccgtaaatgatctgacctgcaactatgatgacagcaacgcgtacttgtatgcaactcttaaagatacgaagaataacaaattcttaagcggccagaccatcacgtttaaaatcaatgataaatcgaaaaacgtggttagtgactcaaacgggaaggccggtattaaaattgaagagaaa

SEQ ID NO: 77616 - DNA, 525 bp, synthetic construct
  source 1..525: mol_type = other DNA
gccagcatctccaaaaagattaatctgaatgtccagggtgcgctgacaccggaaatcaatatgcacaatggtttttacaacgtatcgaatctgctggttgactttactggtgataatgcggagtacattgtctattgctcgttcgataacggcgcttcgtggtataaagataaccactccttatcttttaatcttacgacatgtaattggagcatcatatactattcttcttttcgcggcttcaacagcaccattaaccatgtgaactatgttctcgacggggatgtgccgttggtctgggcaagtcatggctcaggaatttacaacacgaactttcaggttaatctgacgagcgtggatttgttcgatgaaaaaccaatcatctattacaccctggatggcagtgaccctaccgttcaaagcactatttactcagagcccattaatgtggtaaaaaacaccaacttacgtttcttcgccatggacacctttaaccatcggagtgaaatcatttccgtgtattat

SEQ ID NO: 77617 - DNA, 2691 bp, synthetic construct
  source 1..2691: mol_type = other DNA
aacggcaaaacatataacaccatccagaatgcaatcaatgatgacaaaacaaaaaaaggcgacattatcgaagtcaataaagatatcataatcgaaaatgttgtgattaacaaaaacatctatcttatttctaacaacgtgatttggcaatcgaacaacaagtcccctatcatctacatgaaaaatgtaaacaacaccttcattgaaggctttacgtttaaaagcgacaatgggtcaggtattgagctgaacaatgtcagcaactgtgtgatccagaataacaatttttacaacaaatatggctttagtattcataatgaaaataaagataacgataacctaaacaacatctgcattcaggggaacaacttttatgataactattataattacattaatttcgaggttctggaaaatagcaaaattattaataacaattttgaatcgaataaaaatgtttcggcgataaccattctgaactcaaaatccaatattcttataaacaatcaatttacgaacttaaactacggcatcttaattaacaagtcctacgatgatgtcttctttggcaacaacttctcgataaataacattgggctttatctgaactgtgttgatagtaaagtaattagcaacacctttatcaataaccactacggtatttactctataaacgcgtcgaatttacgcattaatttcaaccgtattgtagataactcgaaattcggtgtgtactgtaaaaagggtattgtcgatgccaacaacaactggtggggtaaaaattatatcacgaataacgccctcaattcaggcgacataaacaacaacgaaaacattggaatcaattgctcggcgtacctggttttgaacgtttacgaaacgaactataaaattgacaatggaattgtgtataatgtttcttatgttgcgaacctgcgctccaacaattacggggaaatctttaatcagtattttattcccaactgcaaaatcgtgtataatatgtactgcgaatatctgtatgataatggtgtggtgtaccgcggggtcaacaggatcattgacttaatgctatctgaaggtagctctattaaagaataccggctgggcttcctcaataacctaacggtgacactggatcaccagaacatctcattcttccgtgagagttccttcaatgcgtatgccaccattgatatcgtcagttcggcgatctttaacggttcaaaccttgacattagtgtgagagttccgttggtggataatgtcgattggtttagtatcgtatgccgctatgtggggaactttaaaagtgagctgttattaatctacaatggcgaagtgcgcaacaccatcgttatcgagagctccttctacaatgaggcgaagaatgtgtttagcaacaacttttggaatgcgctggacacctatcactcttgcttttccggttaccgcaacaagcaaatatgcgcatacgcttacttatatctgaatgacccgagcttgaatacaatcgaactgttggataataaactgagcaaaagcaatatccagtttaagctgcaagatgtttataatttactcgctaacaataacatcacgcttaatgatattttactcaatctgatcaagaatagctacagcctgtcggatctggagatgtcctttattgattatgccaatggcaatctgtttgataccatgagcgtatcattaaaatacccgggtaatgaccgactgttttttgcgttcgaggacactatcaacaaaacgttcgtgtggcgcggggactcttcagtgagtttgtataatatccattacgtaaacggcggctattttgatctgactgcaccattcccgattggcgataacggtgatctgatctatgacaatggcaatatttactccattaactataactgcatttataccttcctttcttcagattatgattgtctgaaaacctacacctttgcaaatagcaaaattaacaataacgctctcaactattggctgaaccagaagaaccgtactgatgtgaatggggagctgtattataatatcggctatatgaaagcagcgtatggtagtttccttgagggcctgctcgtaatctactgtaatgatgtggtcgcggacgtgagtgccgataagttcaatgtctcctggactcgggtaaacccaatggtcatgagcgtttgtgacagtctggaaggttattatctgaccggcgaatctgattttaactttggtcgtgaagtagtgggtgatgtaaacaatatcaaatcatttaattttgcttgcagcgcatcattttctattattgaaaagtacgtcatcgacgccctgttcccgaacgaaggaaacaaatcgagcgctatgttctctttgattgatagtctgttcaataatggaactttggaatttattgttgagggaaactacacacttattcgtagcctcaacgttagcaatgttgtctttgtgtacgacgaaactacgggaatcctgcgtgactgtattaacggctgctatggcgcatattgttatgccagccagcagacggaatgggggcataacttcggtgaaaattccttgaaactggaagatctgattgtgggtattataaatggcattgatacctcgctggacaacatgaataatgactggctgggtttcgccggctgtttg

SEQ ID NO: 77618 - DNA, 45 bp, synthetic construct
  source 1..45: mol_type = other DNA
accggtttgtttctggttagtaacccggtgggctggagcattgcg

SEQ ID NO: 77619 - DNA, 78 bp, synthetic construct
  source 1..78: mol_type = other DNA
acgtattacgccgacgatctgaataaaggttggaactataaccgcggggcgcatttcatttttgatgtgggcaccagc

SEQ ID NO: 77620 - DNA, 57 bp, synthetic construct
  source 1..57: mol_type = other DNA
tattatatcaacaaatacattattggcgatatagtgattaataaaatctttagccgc

SEQ ID NO: 77621 - DNA, 36 bp, synthetic construct
  source 1..36: mol_type = other DNA
ttcggcagcagtatctttttgtttattctgaacaaa

SEQ ID NO: 77622 - DNA, 42 bp, synthetic construct
  source 1..42: mol_type = other DNA
tttaacagcagtattatcttgaaatatctgaaaattctgacc

SEQ ID NO: 77623 - DNA, 39 bp, synthetic construct
  source 1..39: mol_type = other DNA
accgatagttttctgatggacccgatcagcgcgattacg

SEQ ID NO: 77624 - DNA, 2979 bp, synthetic construct
  source 1..2979: mol_type = other DNA
gccgaagatattaacgaaaccatcactgcggattcgtcaatcgacgacgtgaacacggtttcggtggaagatgccgtcgatgagacggtatctgatgattccgatagcgacaagggcatcgtggagaaccaggacgttgaaaaaacaaccatgctgaccgaccgtggagttaatgtgaatgcagcaacctggagtaaattgtcacaatatgcgggtgttattggcactgactatattataaccctcacgggggatagctacgcgacagacagccagataaagtttaacaacggcgcgaccattattggttcgccaaacaattacatcacgacgggctcttatactaaaaccccgtttcttaataccaattcggcgctcaccatcactttcatcaatgtcacgtttaagaatatgaatgtcgattatcttctgagcctggcaggcaccaacgtgctggaaaattgtaacttctataacattaccgctggcaccggtcataatgcagtaatctataacaccgatggcacaatgaacctgactaattgtaacgtgattaactcatctgccggttatggtgtggtcagtaattataaatcgggcacttatacaggggtggttatgaatgtcaatcattgcacctttatcaacaactctgcgtctgtcgaacctggtgcgattaataattgcggtatcctcaacgtcgataattccgagttcatcaataatacagcgacctggtgggcaggtgcaatccacacccactacaatgcccagaccatcataaacaacagcctttttgaaggtaatgtcgccggatggaatgggggcgcattatatacctacagtaccctgaaggtatataactccattttcaaacggaacaaatgccacacaaacattggcggcggcgccatcggtgcttcacgatggtggagcggcaactatgatattacaatcgtgaactgcacttttgaagaaaatgaaaactgtaatactaatggaaatggtggcgcaattacggcgttgaatagcggggcactcaacgtgcatgactccactttcatcgccaacgtggcaaaaaacggccaagccatatctgctttcagccaagcatttgaaaacattacggccggcattccgaacctgaaagtatacaataatactttctacaatcacactttaaccacctccgataccgttgaaatcagtggcaattacacatttgaaaacaacacattcattaattgctatcagacgaatctggggacgaataacgtattcattaatccggtaacactgaacaacaacaacttgattcttaaatcaaataaagagcatttgctgatgagtaatttatcggaaaacattctgaaaaatgcgccgaatgtaatctatgtagacagcaattcggacaaggactgtgatgaagatcccaacatcgatgggcacaactgggaaacggcttacggaggcattttcgcgttgtcaagtgcaatatttaacatatgtgacggtggcaaaatttatctggccgatggtgagtatagctatcgcacaaacggcgctattacccatcctaaaaacctgacgatcattgggcagggagcaaataccattgtggacctgatttcatgcggagaagaaacgacgtatacctgcatttttatcaatctgaccgtttctggtaaggattatggtcgcaacaccaattttattaactgtaccttcattaaaccaatttcaatctctgcggacatcaatctgaatagtgtgctgaaagaacatgcggtggaaaacggctacgccaatacatatctgatcaattttgataactgtgtttttaaagacgtggtggacgatcgcatcatcacgctgtttgaatatggtgcgttgaatttcaccgattgcgtatttgagaacatcactgctgattcaattgtgtatcgcaatagcactggctactttgaggatgacagcatttcctttcgtaactgcacgttcagtaactgcaagttcaacggcgtcgttgattcgaagacgaactttgatgacgcgatcgttattgaggactgtacttacgatggtgatgtggcgttaggtacgaccgaggtggatggtcatttctatgtcaatgcaacgaaacttaaggttgttgctgtggcgaccaacatgagcatttcttcgtcgcaacgtggggttgtagttattacgctgcgtgatgcggaggggaatgcggttagtggcgtgaatgtttcatatacggttaacggtgtgaacatgagcggcgtgagcgatgcaaacggcaccatcactatttctgatttaacggatgaggtcactgtcagtgccaacttcacgggcagtgaatcttatttagcgtccaataacaccgctagctttaatttcaccattccgaaagtgtccacgaaactctacgtttccagtgtgacgaccttttataatgccggtaagtatttgactgctacgctgaaagattccaacggggaagtgctggccaatcagaaagttacaattaaaatcaatggtaaaacctacaacaaaataacgaatgcgaaagggcaggccacgctcaagatcagcaccctgctgccgaaaaaatacactgcgactgtaaactatgctggtgacgatacccatattaaatcgtccgcgaacgcgaaagtaattgtgaaaaaagccacgcttaaactaacagcgaaggcaaagacatttaaaaagtcactgaaaaccaaaaaatacaccatcaccctgaaaaacaacgtcggtaaagtcatgaaaaagaccaaagtcaccctgaaaatcaaaggaaagacctacaaagcctacaccaacagcaaaggaatcgccacatttaaaattacaaaactaacgaaaaaaggcaaatacaatgcttacattaagtttgccggaagcaaatactacaacagcctgaacaaaaaagtcaaaattaccttaaaa

SEQ ID NO: 77625 - DNA, 615 bp, synthetic construct
  source 1..615: mol_type = other DNA
gatggcctgattaacacgtttgaagatactatacatgcaggtggcgcggacttcagcattagtggcaaagaaacgggaaattcggcctatggcaccaataccattgactctagttggaccgaaaaaatcgccaaggtaccgggcgttgatgaagcttatccaatttacgtggttctcacctcggtgggtgatgattatatgaataccttaatcggcattgatccggaaggtagtgaactggccgacatcagcatgaaagagggtcgtatcttcgaggacaatacctcggaagtgattcttggtgaaatctatgcagaagataataactactccgtcggtgacagcatcataattaacggcgaggactttaaagtctcaggcatttacgaaactggtgatcagaacatggcaggaggggtgtttacctcaatctctaaaattggagagctgatggatgataaagactccattagcaacatctatgttaaagtaaacaagggggaggacgcgcaggcggttgctgatcgcattgatactaaatacggggataatatcacaacggtcacaagcgtgatggaaatgacgcagatggcggatatgttgaacatgctgcaa

SEQ ID NO: 77626 - DNA, 33 bp, synthetic construct; identical to SEQ ID NO: 77095
  source 1..33: mol_type = other DNA

SEQ ID NO: 77627 - DNA, 639 bp, synthetic construct
  source 1..639: mol_type = other DNA
gtatggtttatcggtcatgatgtggatctggacgagggtagcaaaacaatactggtatgtgcgattgatgaaagcgaggaccgcccgggcatgggggcttgcgacatggcgttcctggtccatttggagaatggagcgattaaaaattatacgcctgtctacccgggcggcatgacccacccaactgctcaggagccggctgaagctcaaagtcagggtgccggctcagatctgttactgcacgatgcattctgggatgtggacaatagtaaaggcatgaacttggcaaaagaaatcgtggaatatcgtactggtagctccgttgattcggttgtcgccattaatacgaaggccttagatgcgatcctgtccgcggcggcgccccttgaagtaaacggtaagataattaacggtagtggaatcgatttcattcgcgaagatggcagcaatggtgtgagccggggcgacgccgtcatggaaatcgtgaaagcgaccgccaactcggccaaagacccggttaaaaaatctgcaatgatcaatgccgcagtggatcagtactccaagggcaacattattatggatcagcaagggtcttttgttgacctactcgcatcaaaagggattgaaaccttttttaac

SEQ ID NO: 77628 - DNA, 33 bp, synthetic construct
  source 1..33: mol_type = other DNA
agctcgaccgtgatgggcgatattctgtccagt

SEQ ID NO: 77629 - DNA, 66 bp, synthetic construct
  source 1..66: mol_type = other DNA
atcggtaacccgcgcagcggcattgcggtgtatatgtcgtacctgattagtgaaatgaatatcaac

SEQ ID NO: 77630 - DNA, 420 bp, synthetic construct
  source 1..420: mol_type = other DNA
aaagaaaaggttaaggtaaatgtaagcattgacgatcacccactgaacaacaaaggtttcattgtgatcaaattggtcgatagtcgcggcaaagacattgaatccaacggaaccatccattacaaaattacggacgagtttggcaattataaatgggcatacaaatcatatgatggtgaaatccgtctgaaatatacggcgggcatttataaggtggacgtgaaattcgatggtgattttcactataactctgccattaaaaataaatcggttatagtcaaaactgagaagtttaacccgtacacctactatgataatcataattggggcttaaatcaggaaattgatgactatatcgaatacaactactgggatgaagatatctatgatgatccgacaaactatgacggggaggggcct

SEQ ID NO: 77631 - DNA, 78 bp, synthetic construct
  source 1..78: mol_type = other DNA
ggcatgttgagtgaatgggttgcgaccttcctgggtgatggcttactgtcgagctttgtgtgcgacggtattatcggg

SEQ ID NO: 77632 - DNA, 105 bp, synthetic construct
  source 1..105: mol_type = other DNA
ttcccgtatggcggcagcgatcctcaaatgagtttactggggatgatcggtaccgcgattgctccgatttttgcgccactgggatttggtacgtggcaggcagcc

SEQ ID NO: 77633 - DNA, 78 bp, synthetic construct
  source 1..78: mol_type = other DNA
tttggtacgttagcgggcatggaggaagacgatgaagaagggattaccaacctgatccatgatactttcaccccgctg

SEQ ID NO: 77634 - DNA, 54 bp, synthetic construct; identical to SEQ ID NO: 77103
  source 1..54: mol_type = other DNA

SEQ ID NO: 77635 - DNA, 42 bp, synthetic construct
  source 1..42: mol_type = other DNA
agtgggcagctgggttattttggccaaaatttaagcattaac

SEQ ID NO: 77636 - DNA, 141 bp, synthetic construct
  source 1..141: mol_type = other DNA
attgcatcgggcgatcccgacggtctggaaaaatccgctgaagacgcgagtgtgcctgaggacttccaaattgaaccgattaacggaatcccggatgcgatctttccggattatgcatttgccagcgccccagataatcag

SEQ ID NO: 77637 - DNA, 36 bp, synthetic construct
  source 1..36: mol_type = other DNA
aacatgccgattccatttggtaccagcggccatatg

SEQ ID NO: 77638 - DNA, 51 bp, synthetic construct
  source 1..51: mol_type = other DNA
gtgggtggcatcccgttgctgaaaccgagcattcgctatttactgaaacca

SEQ ID NO: 77639 - DNA, 261 bp, synthetic construct
  source 1..261: mol_type = other DNA
cgtagccttagcgagatgacgataacatcttcaacaaatccgttttatactttacaaagtcgcgcggatttcacgttacatgttctgaacctgctggattttgtgggcggcaacgcaggtctgacccacgggcatttgctgacctcgtccatcccgggtagtgatctgggcccacgcatgctcattggaaaaatcattgcctggcggactgaagttacggtgacccctaccttgattggccagatggtagtcgacttcggt

SEQ ID NO: 77640 - DNA, 699 bp, synthetic construct
  source 1..699: mol_type = other DNA
atacacatcaccacggataacagctccgaggtgcagaaaaccgtgtttgatgcctcgaccatcaataaaattccagatacttattttaactactatcgcgatggctatattgtgggtacgacggtcgatggctttaatgcgagtactggagagaagattaccctgaacggcactataaaatggattgggaacaacggtggtacagacgttaagatcttagtcgaatccgacaacaccacgtacctggttggtctctataaatcgattccggaagcggatatttatatcgataagatttcactggaaactaatggcagtacctaccctaacctggtagaaattaaagccagccccgaaaatatctccacgatcaatgacttgaataaaaacttatcaaatagcgatttcgaaatctcgacgattatctctcttgactccctggacttggtgaaaatccaggagatcgctaacaaaatcaattctcatgataaacggatggcaattaaaaccccgagttcaggactagggaatagcctgatattggaaaatgcgaataaacaaacacttgacgatgcaaattctgttctgggcaacattaacggtctgacagatgaactcaccattcgtatttacaactgcagtgacagccaactggagcaggtaaagaatagctataacattaccaacatccgcacattc

SEQ ID NO: 77641 - DNA, 66 bp, synthetic construct
  source 1..66: mol_type = other DNA
agtgaggtgggcattctgccgtatacctttgtcaacgtttacttaagcattcaggaaatcgcgaat

SEQ ID NO: 77642 - DNA, 45 bp, synthetic construct
  source 1..45: mol_type = other DNA
gatctgggcaaccgcattaccgaaatctatcatgcggtttttgtg

SEQ ID NO: 77643 - DNA, 333 bp, synthetic construct
  source 1..333: mol_type = other DNA
gttattactaacaacggcatttcatttaataatacaagtgattctgtcgtgaacaatacaaccaacaccaccaatatcacggctaatgatactgatgaaacgggtgcgacgcatgataccggactggtagcctccagctcagacgatggttcctcgtacagctcgtcgggttatagcagcagttctggctcaaacagcggttctagcagcgggcaccagtccgacaactctcaaagtagcagcgggagtgaatcctcgtcaggcagcgaatccaattcggaaccggagtctgatagtgcaggccagagtgagggctcatccgcggacttcgaa

SEQ ID NO: 77644 - protein, 41 aa, Methanobrevibacter gottschalkii; identical to SEQ ID NO: 75518

SEQ ID NO: 77645 - protein, 34 aa, Methanobrevibacter gottschalkii; identical to SEQ ID NO: 56630

SEQ ID NO: 77646 - protein, 28 aa, Methanobrevibacter gottschalkii
KKTALGLGICKFVFGVETLLPVAPWPFI

SEQ ID NO: 77647 - protein, 646 aa, Methanobrevibacter gottschalkii; identical to SEQ ID NO: 75524

SEQ ID NO: 77648 - protein, 458 aa, Methanobrevibacter gottschalkii; identical to SEQ ID NO: 75525

SEQ ID NO: 77649 - protein, 947 aa, Methanobrevibacter gottschalkii; identical to SEQ ID NO: 75526

SEQ ID NO: 77650 - protein, 1446 aa, Methanobrevibacter gottschalkii; identical to SEQ ID NO: 75527

SEQ ID NO: 77651 - protein, 11 aa, Methanobrevibacter gottschalkii
NFPYTKWLYFA

SEQ ID NO: 77652 - protein, 59 aa, Methanobrevibacter gottschalkii; identical to SEQ ID NO: 75529

SEQ ID NO: 77653 - protein, 244 aa, Methanobrevibacter gottschalkii; identical to SEQ ID NO: 75530

SEQ ID NO: 77654 - protein, 11 aa, Methanobrevibacter gottschalkii
VAGLGPTAIAG

SEQ ID NO: 77655 - protein, 19 aa, Methanobrevibacter gottschalkii
PLLVSYGASGQTLNEAIAY

SEQ ID NO: 77656 - protein, 11 aa, Methanobrevibacter gottschalkii
SQVGGDYGIAT

SEQ ID NO: 77657 - protein, 21 aa, Methanobrevibacter gottschalkii
PLSTLFAYTPETTNLVPGIAL

SEQ ID NO: 77658 - protein, 371 aa, Methanobrevibacter gottschalkii; identical to SEQ ID NO: 75537

SEQ ID NO: 77659 - protein, 43 aa, Methanobrevibacter gottschalkii; identical to SEQ ID NO: 75538

SEQ ID NO: 77660 - protein, 26 aa, Methanobrevibacter gottschalkii
FFNASLFNTYSFHTISELGIPNVNSP

SEQ ID NO: 77661 - protein, 12 aa, Methanobrevibacter gottschalkii
GIITAVGGFKLG

SEQ ID NO: 77662 - protein, 366 aa, Methanobrevibacter gottschalkii; identical to SEQ ID NO: 75542

SEQ ID NO: 77663 - protein, 13 aa, Methanobrevibacter gottschalkii
QVYLISQIQLPLT

SEQ ID NO: 77664 - protein, 1378 aa, Methanobrevibacter gottschalkii; identical to SEQ ID NO: 75554

SEQ ID NO: 77665 - protein, 329 aa, Methanobrevibacter gottschalkii; identical to SEQ ID NO: 75555

SEQ ID NO: 77666 - protein, 28 aa, Methanobrevibacter gottschalkii
NSAPVLGGYEATGLGQNGFGSASSVGLN

SEQ ID NO: 77667 - protein, 20 aa, Methanobrevibacter gottschalkii
NPTLGANFITFGATAVILQA

SEQ ID NO: 77668 - protein, 18 aa, Methanobrevibacter gottschalkii
LNPLIRPVTHLFLMGSSK

SEQ ID NO: 77669 - protein, 64 aa, Methanobrevibacter gottschalkii; identical to SEQ ID NO: 75561

SEQ ID NO: 77670 - protein, 72 aa, Methanobrevibacter gottschalkii; identical to SEQ ID NO: 75562

SEQ ID NO: 77671 - protein, 14 aa, Methanobrevibacter gottschalkii
TNFGQITNFISINP

SEQ ID NO: 77672 - protein, 460 aa, Methanobrevibacter gottschalkii; identical to SEQ ID NO: 75566

SEQ ID NO: 77673 - protein, 52 aa, Methanobrevibacter gottschalkii; identical to SEQ ID NO: 75570

SEQ ID NO: 77674 - protein, 17 aa, Methanobrevibacter gottschalkii
PGMPTSKTLLYYVSQVE

SEQ ID NO: 77675 - protein, 15 aa, Methanobrevibacter gottschalkii
PMKIPVAKGVEISIM

SEQ ID NO: 77676 - protein, 41 aa, Methanobrevibacter gottschalkii; identical to SEQ ID NO: 75578

SEQ ID NO: 77677 - protein, 15 aa, Methanobrevibacter gottschalkii
VPQPATPTIGAILKL

SEQ ID NO: 77678 - protein, 15 aa, Methanobrevibacter gottschalkii
IPLASTGSWEALFDL

SEQ ID NO: 77679 - protein, 13 aa, Methanobrevibacter gottschalkii
ISFNWVLNSYGNL

SEQ ID NO: 77680 - protein, 33 aa, Methanobrevibacter gottschalkii; identical to SEQ ID NO: 75582

SEQ ID NO: 77681 - protein, 12 aa, Methanobrevibacter gottschalkii
IYPSAFNSETSV

SEQ ID NO: 77682 - protein, 14 aa, Methanobrevibacter gottschalkii
TMGVETIVRIILGF

SEQ ID NO: 77683 - protein, 150 aa, Methanobrevibacter gottschalkii; identical to SEQ ID NO: 75586

SEQ ID NO: 77684 - protein, 24 aa, Methanobrevibacter gottschalkii
ATLGGSLFGIFGGLTGFTLSGITS

SEQ ID NO: 77685 - protein, 15 aa, Methanobrevibacter gottschalkii
GYLGTFKEGFFTTEN

SEQ ID NO: 77686 - protein, 106 aa, Methanobrevibacter gottschalkii; identical to SEQ ID NO: 75589

SEQ ID NO: 77687 - protein, 180 aa, Methanobrevibacter gottschalkii; identical to SEQ ID NO: 75590

SEQ ID NO: 77688 - protein, 46 aa, Methanobrevibacter gottschalkii; identical to SEQ ID NO: 75592

SEQ ID NO: 77689 - protein, 90 aa, Methanobrevibacter gottschalkii; identical to SEQ ID NO: 75593

SEQ ID NO: 77690 - protein, 16 aa, Methanobrevibacter gottschalkii
MVFIPQFVPAAFLNMY

SEQ ID NO: 77691 - protein, 24 aa, Methanobrevibacter gottschalkii
MDFVTLGGNLLGTIPLGDIVLYLT

SEQ ID NO: 77692 - protein, 18 aa, Methanobrevibacter gottschalkii
ASTGTLSLAVLSQMPVSP

SEQ ID NO: 77693 - protein, 22 aa, Methanobrevibacter gottschalkii
VTGSMNIGEIITYQSVNGPLVF

SEQ ID NO: 77694 - protein, 84 aa, Methanobrevibacter gottschalkii; identical to SEQ ID NO: 75600

SEQ ID NO: 77695 - protein, 15 aa, Methanobrevibacter gottschalkii
SYILTGSYYYSGAPT

SEQ ID NO: 77696 - protein, 12 aa, Methanobrevibacter gottschalkii
TGDYYYPNSPQD

SEQ ID NO: 77697 - protein, 12 aa, Methanobrevibacter gottschalkii
FGDAVDNYVDSL

SEQ ID NO: 77698 - protein, 11 aa, Methanobrevibacter gottschalkii
YQGPQNIRFSG

SEQ ID NO: 77699 - protein, 19 aa, Methanobrevibacter gottschalkii
DSTKSLNYTSFKAFLILTP

SEQ ID NO: 77700 - protein, 59 aa, Methanobrevibacter gottschalkii; identical to SEQ ID NO: 75619

SEQ ID NO: 77701 - protein, 102 aa, Methanobrevibacter gottschalkii; identical to SEQ ID NO: 75620

SEQ ID NO: 77702 - protein, 14 aa, Methanobrevibacter gottschalkii
AYTSPEILNNINTS

SEQ ID NO: 77703 - protein, 23 aa, Methanobrevibacter gottschalkii
TALSGAIQSDISNPIQDLINSTG

SEQ ID NO: 77704 - protein, 15 aa, Methanobrevibacter gottschalkii
LNSSVTNLITGTINP

SEQ ID NO: 77705 - protein, 968 aa, Methanobrevibacter gottschalkii; identical to SEQ ID NO: 75626

SEQ ID NO: 77706 - protein, 543 aa, Methanobrevibacter gottschalkii; identical to SEQ ID NO: 75627

SEQ ID NO: 77707 - protein, 31 aa, Methanobrevibacter gottschalkii; identical to SEQ ID NO: 75628

SEQ ID NO: 77708 - protein, 14 aa, Methanobrevibacter gottschalkii
GAYMSADPVYNGIM

SEQ ID NO: 77709 - protein, 150 aa, Methanobrevibacter gottschalkii; identical to SEQ ID NO: 75630

SEQ ID NO: 77710 - protein, 146 aa, Methanobrevibacter gottschalkii; identical to SEQ ID NO: 75631

SEQ ID NO: 77711 - protein, 178 aa, Methanobrevibacter gottschalkii; identical to SEQ ID NO: 75636

SEQ ID NO: 77712 - protein, 1288 aa, Methanobrevibacter gottschalkii; identical to SEQ ID NO: 75637

SEQ ID NO: 77713 - protein, 637 aa, Methanobrevibacter gottschalkii; identical to SEQ ID NO: 75638

SEQ ID NO: 77714 - protein, 347 aa, Methanobrevibacter gottschalkii; identical to SEQ ID NO: 75640

SEQ ID NO: 77715 - protein, 48 aa, Methanobrevibacter gottschalkii; identical to SEQ ID NO: 75641

SEQ ID NO: 77716 - protein, 394 aa, Methanobrevibacter gottschalkii; identical to SEQ ID NO: 75642

SEQ ID NO: 77717 - protein, 925 aa, Methanobrevibacter gottschalkii; identical to SEQ ID NO: 75643

SEQ ID NO: 77718 - protein, 97 aa, Methanobrevibacter gottschalkii; identical to SEQ ID NO: 75644

SEQ ID NO: 77719 - protein, 1658 aa, Methanobrevibacter gottschalkii; identical to SEQ ID NO: 75647

SEQ ID NO: 77720 - protein, 11 aa, Methanobrevibacter gottschalkii
SNLDELFNEKL

SEQ ID NO: 77721 - protein, 12 aa, Methanobrevibacter gottschalkii
TEQITGLIYSYN

SEQ ID NO: 77722 - protein, 20 aa, Methanobrevibacter gottschalkii
LPNITSMIQNPMDAIEIASP

SEQ ID NO: 77723 - protein, 70 aa, Methanobrevibacter gottschalkii; identical to SEQ ID NO: 75653

SEQ ID NO: 77724 - protein, 836 aa, Methanobrevibacter gottschalkii; identical to SEQ ID NO: 75654

SEQ ID NO: 77725 - protein, 21 aa, Methanobrevibacter gottschalkii
TTIFNGINSISKHTGTMDFNT

SEQ ID NO: 77726 - protein, 16 aa, Methanobrevibacter gottschalkii
SDIVDIGIQNANFQFI

SEQ ID NO: 77727 - protein, 12 aa, Methanobrevibacter gottschalkii
YDAMRGSILTGD

SEQ ID NO: 77728 - protein, 1824 aa, Methanobrevibacter gottschalkii; identical to SEQ ID NO: 75659

SEQ ID NO: 77729 - protein, 837 aa, Methanobrevibacter gottschalkii; identical to SEQ ID NO: 75660

SEQ ID NO: 77730 - protein, 27 aa, Methanobrevibacter gottschalkii
LPINGIYHYDADFILNSFLLLDGLPYV

SEQ ID NO: 77731 - protein, 16 aa, Methanobrevibacter gottschalkii
NTGIFQPTQIMKYPPT

SEQ ID NO: 77732 - protein, 11 aa, Methanobrevibacter gottschalkii
AEQLVQAIYSY

SEQ ID NO: 77733 - protein, 12 aa, Methanobrevibacter gottschalkii
IVAPTIGISSLN

SEQ ID NO: 77734 - protein, 19 aa, Methanobrevibacter gottschalkii
PNIASSLTKNTSPITIASP

SEQ ID NO: 77735 - protein, 66 aa, Methanobrevibacter gottschalkii; identical to SEQ ID NO: 75669

SEQ ID NO: 77736 - protein, 250 aa, Methanobrevibacter gottschalkii; identical to SEQ ID NO: 75670

SEQ ID NO: 77737 - protein, 14 aa, Methanobrevibacter gottschalkii
EHILRDYLNIIHGN

SEQ ID NO: 77738 - protein, 16 aa, Methanobrevibacter gottschalkii
FGQSTALTFPIHNIPL

SEQ ID NO: 77739 - protein, 20 aa, Methanobrevibacter gottschalkii
PEISDGGHFMMDMLDVAMPS

SEQ ID NO: 77740 - protein, 213 aa, Methanobrevibacter gottschalkii; identical to SEQ ID NO: 75679

SEQ ID NO: 77741 - protein, 47 aa, Methanobrevibacter gottschalkii; identical to SEQ ID NO: 75680

SEQ ID NO: 77742 - protein, 1193 aa, Methanobrevibacter gottschalkii; identical to SEQ ID NO: 75681

SEQ ID NO: 77743 - protein, 1178 aa, Methanobrevibacter gottschalkii; identical to SEQ ID NO: 75682

SEQ ID NO: 77744 - protein, 1582 aa, Methanobrevibacter gottschalkii; identical to SEQ ID NO: 75683

SEQ ID NO: 77745 - protein, 150 aa, Methanobrevibacter gottschalkii; identical to SEQ ID NO: 75690

SEQ ID NO: 77746 - protein, 13 aa, Methanobrevibacter gottschalkii
VPAIAQDFAMNNV

SEQ ID NO: 77747 - protein, 11 aa, Methanobrevibacter gottschalkii
YHLQYVRGWDA

SEQ ID NO: 77748 - protein, 18 aa, Methanobrevibacter gottschalkii
IMGNLELSPQYTTMIIQA

SEQ ID NO: 77749 - protein, 207 aa, Methanobrevibacter gottschalkii; identical to SEQ ID NO: 75694

SEQ ID NO: 77750 - protein, 169 aa, Methanobrevibacter gottschalkii; identical to SEQ ID NO: 75699

SEQ ID NO: 77751 - protein, 52 aa, Methanobrevibacter gottschalkii; identical to SEQ ID NO: 75700

SEQ ID NO: 77752 - protein, 319 aa, Methanobrevibacter gottschalkii; identical to SEQ ID NO: 75701

SEQ ID NO: 77753 - protein, 16 aa, Methanobrevibacter gottschalkii
VGLLNEFVYNKIIINP

SEQ ID NO: 77754 - protein, 143 aa, Methanobrevibacter gottschalkii; identical to SEQ ID NO: 75706

SEQ ID NO: 77755 - protein, 16 aa, Methanobrevibacter gottschalkii
NALLVVAPDFAKAQNL

SEQ ID NO: 77756 - protein, 12 aa, Methanobrevibacter gottschalkii
NPLMGGEIISPD

SEQ ID NO: 77757 - protein, 27 aa, Methanobrevibacter gottschalkii
LRDYFIGSIRNSMGNDYVNVIAPFLNY

SEQ ID NO: 77758 - protein, 212 aa, Methanobrevibacter gottschalkii; identical to SEQ ID NO: 75743

SEQ ID NO: 77759 - protein, 11 aa, Methanobrevibacter gottschalkii
VSGLGADALAG

SEQ ID NO: 77760 - protein, 17 aa, Methanobrevibacter gottschalkii
ILNAMGAGQTIGYATDY

SEQ ID NO: 77761 - protein, 12 aa, Methanobrevibacter gottschalkii
TFVGSTDSVAVY

SEQ ID NO: 77762 - protein, 23 aa, Methanobrevibacter gottschalkii
GDISSVFASSGSSVRIAAELTGF

SEQ ID NO: 77763 - protein, 519 aa, Methanobrevibacter gottschalkii; identical to SEQ ID NO: 75753

SEQ ID NO: 77764 - protein, 515 aa, Methanobrevibacter gottschalkii; identical to SEQ ID NO: 75754

SEQ ID NO: 77765 - protein, 401 aa, Methanobrevibacter gottschalkii; identical to SEQ ID NO: 75762

SEQ ID NO: 77766 - protein, 220 aa, Methanobrevibacter gottschalkii; identical to SEQ ID NO: 75763

SEQ ID NO: 77767 - protein, 12 aa, Methanobrevibacter gottschalkii
KLFNPSTITTPD

SEQ ID NO: 77768 - protein, 946 aa, Methanobrevibacter gottschalkii; identical to SEQ ID NO: 75766

SEQ ID NO: 77769 - protein, 28 aa, Methanobrevibacter gottschalkii
YISNITEKTQTNIQNLLKTERDFLINKI

SEQ ID NO: 77770 - protein, 33 aa, Methanobrevibacter gottschalkii; identical to SEQ ID NO: 70885

SEQ ID NO: 77771 - protein, 28 aa, Methanobrevibacter gottschalkii
MFDIMGMIYGVLNTIFDPILAMDPNPSN

SEQ ID NO: 77772 - protein, 41 aa, Methanobrevibacter gottschalkii; identical to SEQ ID NO: 75773

SEQ ID NO: 77773 - protein, 222 aa, Methanobrevibacter gottschalkii; identical to SEQ ID NO: 75774

SEQ ID NO: 77774 - protein, 18 aa, Methanobrevibacter gottschalkii
IENKISIGHPNIKGFEAS

SEQ ID NO: 77775 - protein, 85 aa, Methanobrevibacter gottschalkii; identical to SEQ ID NO: 75776

SEQ ID NO: 77776 - protein, 58 aa, Methanobrevibacter gottschalkii; identical to SEQ ID NO: 75777

SEQ ID NO: 77777 - protein, 109 aa, Methanobrevibacter gottschalkii; identical to SEQ ID NO: 75778

SEQ ID NO: 77778 - protein, 20 aa, Methanobrevibacter gottschalkii
LGYGLRNIMANHVVAITNKQ

SEQ ID NO: 77779 - protein, 53 aa, Methanobrevibacter gottschalkii; identical to SEQ ID NO: 75780

SEQ ID NO: 77780 - protein, 25 aa, Methanobrevibacter gottschalkii
AIEDKIIKVAKKMPSGYNMYEPIDW

SEQ ID NO: 77781 - protein, 26 aa, Methanobrevibacter gottschalkii
STVLYYNDMLEYETGLPGVDYGRTEG

SEQ ID NO: 77782 - protein, 29 aa, Methanobrevibacter gottschalkii
SHSIYGGGGPGTFHGNHVVTRHAKGTAIP

SEQ ID NO: 77783 - protein, 45 aa, Methanobrevibacter gottschalkii; identical to SEQ ID NO: 75784

SEQ ID NO: 77784 - protein, 290 aa, Methanobrevibacter gottschalkii; identical to SEQ ID NO: 75785

SEQ ID NO: 77785 - protein, 299 aa, Methanobrevibacter gottschalkii; identical to SEQ ID NO: 75786

SEQ ID NO: 77786 - protein, 850 aa, Methanobrevibacter gottschalkii; identical to SEQ ID NO: 75787

SEQ ID NO: 77787 - protein, 123 aa, Methanobrevibacter gottschalkii; identical to SEQ ID NO: 75788

SEQ ID NO: 77788 - protein, 12 aa, Methanobrevibacter gottschalkii
LPQLANEFNLNN

SEQ ID NO: 77789 - protein, 18 aa, Methanobrevibacter gottschalkii
IMGNVPIIPEYFSLLTKS

SEQ ID NO: 77790 - protein, 128 aa, Methanobrevibacter gottschalkii; identical to SEQ ID NO: 75791

SEQ ID NO: 77791 - protein, 20 aa, Methanobrevibacter gottschalkii
YYGGNPTYLWKVFIGEPSIT

SEQ ID NO: 77792 - protein, 12 aa, Methanobrevibacter gottschalkii
YINSTAIHSIYQ

SEQ ID NO: 77793 - protein, 31 aa, Methanobrevibacter gottschalkii; identical to SEQ ID NO: 75794

SEQ ID NO: 77794 - protein, 24 aa, Methanobrevibacter gottschalkii
TLPGSSIGLAELFNPDWSLLTHFE

SEQ ID NO: 77795 - protein, 37 aa, Methanobrevibacter gottschalkii; identical to SEQ ID NO: 75796

SEQ ID NO: 77796 - protein, 19 aa, Methanobrevibacter gottschalkii
LVSQSINPANVGIGVLGGL

SEQ ID NO: 77797 - protein, 21 aa, Methanobrevibacter gottschalkii
LGAQAVTIGGLGATAPGLGIG

SEQ ID NO: 77798 - protein, 12 aa, Methanobrevibacter gottschalkii
YKYMLNALHNFH

SEQ ID NO: 77799 - protein, 14 aa, Methanobrevibacter gottschalkii
KLIATIIGTGDALP

SEQ ID NO: 77800 - protein, 12 aa, Methanobrevibacter gottschalkii
KLPSVTGSCSHP

SEQ ID NO: 77801 - protein, 42 aa, Methanobrevibacter gottschalkii; identical to SEQ ID NO: 70549

SEQ ID NO: 77802 - protein, 22 aa, Methanobrevibacter gottschalkii
GKGDVIYETGILGIVVTTDSWH

SEQ ID NO: 77803 - protein, 17 aa, Methanobrevibacter gottschalkii
PHASTTFAKLFGITRGL

SEQ ID NO: 77804 - protein, 11 aa, Methanobrevibacter gottschalkii
PRLFAPESVDA

SEQ ID NO: 77805 - protein, 113 aa, Methanobrevibacter gottschalkii; identical to SEQ ID NO: 75814

SEQ ID NO: 77806 - protein, 31 aa, Methanobrevibacter gottschalkii; identical to SEQ ID NO: 75816

SEQ ID NO: 77807 - protein, 118 aa, Methanobrevibacter gottschalkii; identical to SEQ ID NO: 75818

SEQ ID NO: 77808 - protein, 113 aa, Methanobrevibacter gottschalkii; identical to SEQ ID NO: 75819

SEQ ID NO: 77809 - protein, 17 aa, Methanobrevibacter gottschalkii
SWANPLVQTHSYFYFNT

SEQ ID NO: 77810 - protein, 17 aa, Methanobrevibacter gottschalkii
AKDYVANTIPFVPFRIS

SEQ ID NO: 77811 - protein, 21 aa, Methanobrevibacter gottschalkii
FYPNAESMAHKLFGLIQINDF

SEQ ID NO: 77812 - protein, 13 aa, Methanobrevibacter gottschalkii
GLSGAMLGVDAGG

SEQ ID NO: 77813 - protein, 29 aa, Methanobrevibacter gottschalkii
KFIDAVIKYSKLYPSASNVFHLSQLPAND

SEQ ID NO: 77814 - protein, 34 aa, Methanobrevibacter gottschalkii; identical to SEQ ID NO: 75829

SEQ ID NO: 77815 - protein, 29 aa, Methanobrevibacter gottschalkii
IHEPRPFLSLDNVHLLIAEDDPLSFPSGH

SEQ ID NO: 77816 - protein, 11 aa, Methanobrevibacter gottschalkii
VASLGEAAISG

SEQ ID NO: 77817 - protein, 19 aa, Methanobrevibacter gottschalkii
LIGILFGQIEVDVWQNADK

SEQ ID NO: 77818 - protein, 11 aa, Methanobrevibacter gottschalkii
STFGTMAIAAN

SEQ ID NO: 77819 - protein, 17 aa, Methanobrevibacter gottschalkii
LNIYNLSAKTAAMTSEM

SEQ ID NO: 77820 - protein, 16 aa, Methanobrevibacter gottschalkii
LNINFLNIFPQLSVYP

SEQ ID NO: 77821 - protein, 12 aa, Methanobrevibacter gottschalkii
MMLIIKNIFLVI

SEQ ID NO: 77822 - protein, 113 aa, Methanobrevibacter gottschalkii; identical to SEQ ID NO: 75837

SEQ ID NO: 77823 - protein, 173 aa, Methanobrevibacter gottschalkii; identical to SEQ ID NO: 75838

SEQ ID NO: 77824 - protein, 12 aa, Methanobrevibacter gottschalkii
LQKNLYIIGNYT

SEQ ID NO: 77825 - protein, 212 aa, Methanobrevibacter gottschalkii; identical to SEQ ID NO: 75840

SEQ ID NO: 77826 - protein, 198 aa, Methanobrevibacter gottschalkii; identical to SEQ ID NO: 75841

SEQ ID NO: 77827 - protein, 13 aa, Methanobrevibacter gottschalkii
VLFSSQAEFTHPF

SEQ ID NO: 77828 - protein, 99 aa, Methanobrevibacter gottschalkii; identical to SEQ ID NO: 75844

SEQ ID NO: 77829 - protein, 11 aa, Methanobrevibacter gottschalkii
FPTNMDYLTSP

SEQ ID NO: 77830 - protein, 20 aa, Methanobrevibacter gottschalkii
FIGFTYDNLVQASVQVGFPW

SEQ ID NO: 77831 - protein, 12 aa, Methanobrevibacter gottschalkii
AFNFSHVFYIES

SEQ ID NO: 77832 - protein, 105 aa, Methanobrevibacter gottschalkii; identical to SEQ ID NO: 75848

SEQ ID NO: 77833 - protein, 138 aa, Methanobrevibacter gottschalkii; identical to SEQ ID NO: 75849

SEQ ID NO: 77834 - protein, 886 aa, Methanobrevibacter gottschalkii; identical to SEQ ID NO: 75850

SEQ ID NO: 77835 - protein, 23 aa, Methanobrevibacter gottschalkii
MPGVLESKTLMNFLQIKEMLYHI

SEQ ID NO: 77836 - protein, 240 aa, Methanobrevibacter gottschalkii; identical to SEQ ID NO: 75853

SEQ ID NO: 77837 - protein, 12 aa, Methanobrevibacter gottschalkii
PKILNPDATSYT

SEQ ID NO: 77838 - protein, 107 aa, Methanobrevibacter gottschalkii; identical to SEQ ID NO: 75872

SEQ ID NO: 77839 - protein, 20 aa, Methanobrevibacter gottschalkii
FEGQVATVANFIKMYFDSNF

SEQ ID NO: 77840 - protein, 18 aa, Methanobrevibacter gottschalkii
YTITMCILKNKLLYYKYE

SEQ ID NO: 77841 - protein, 13 aa, Methanobrevibacter gottschalkii
LKYEYKILFTFNP

SEQ ID NO: 77842 - protein, 14 aa, Methanobrevibacter gottschalkii
LFNFNVGNLVPLTD

SEQ ID NO: 77843 - protein, 11 aa, Methanobrevibacter gottschalkii
VAGLGADALAA

SEQ ID NO: 77844 - protein, 19 aa, Methanobrevibacter gottschalkii
VPILQFMGAGDTIQYAMDY

SEQ ID NO: 77845 - protein, 12 aa, Methanobrevibacter gottschalkii
VLAAGTTAVAVY

SEQ ID NO: 77846 - protein, 21 aa, Methanobrevibacter gottschalkii
PIATIFSYTAASASLSPQIAT

SEQ ID NO: 77847 - protein, 149 aa, Methanobrevibacter gottschalkii; identical to SEQ ID NO: 75885

SEQ ID NO: 77848 - protein, 126 aa, Methanobrevibacter gottschalkii; identical to SEQ ID NO: 75886

SEQ ID NO: 77849 - protein, 23 aa, Methanobrevibacter gottschalkii
TGMIPADAITNYQQLIAGNMTLP

SEQ ID NO: 77850 - protein, 11 aa, Methanobrevibacter gottschalkii
LQIIFRTTAIG

SEQ ID NO: 77851 - protein, 14 aa, Methanobrevibacter gottschalkii
DDKFLKESYKEYYS

SEQ ID NO: 77852 - protein, 98 aa, Methanobrevibacter gottschalkii; identical to SEQ ID NO: 75898

SEQ ID NO: 77853 - protein, 299 aa, Methanobrevibacter gottschalkii; identical to SEQ ID NO: 75901

SEQ ID NO: 77854 - protein, 153 aa, Methanobrevibacter gottschalkii; identical to SEQ ID NO: 75902

SEQ ID NO: 77855 - protein, 19 aa, Methanobrevibacter gottschalkii
NPIPSEIIYEKIIFLNGGL

SEQ ID NO: 77856 - protein, 17 aa, Methanobrevibacter gottschalkii
LSSTYPTFMDAVFAIRN

SEQ ID NO: 77857 - protein, 25 aa, Methanobrevibacter gottschalkii
GTCPTSAIEVTPNAIVHCDTCGEEP

SEQ ID NO: 77858 - protein, 12 aa, Methanobrevibacter gottschalkii
LKVEEYEIAEGI

SEQ ID NO: 77859 - protein, 21 aa, Methanobrevibacter gottschalkii
ACPGDFIAANSSSLTVAIPSV

SEQ ID NO: 77860 - protein, 24 aa, Methanobrevibacter gottschalkii
PTEAIRVVTKTGMSCPALVETDAE

SEQ ID NO: 77861 - protein, 20 aa, Methanobrevibacter gottschalkii
SNDALKVEQYEVTINGEAVA

SEQ ID NO: 77862 - protein, 13 aa, Methanobrevibacter gottschalkii
DCIEACPYDMIHK

SEQ ID NO: 77863 - protein, 13 aa, Methanobrevibacter gottschalkii
DTAINQSSFVSDP

SEQ ID NO: 77864 - protein, 13 aa, Methanobrevibacter gottschalkii
IPINGTALHVFPL

SEQ ID NO: 77865 - protein, 15 aa, Methanobrevibacter gottschalkii
PSKVFIPLFMKIFGG

SEQ ID NO: 77866 - protein, 60 aa, Methanobrevibacter gottschalkii; identical to SEQ ID NO: 75915

SEQ ID NO: 77867 - protein, 112 aa, Methanobrevibacter gottschalkii; identical to SEQ ID NO: 75917

SEQ ID NO: 77868 - protein, 31 aa, Methanobrevibacter gottschalkii; identical to SEQ ID NO: 75918

SEQ ID NO: 77869 - protein, 24 aa, Methanobrevibacter gottschalkii
LTLPGASIGYTQIFTPDWNALTNL

SEQ ID NO: 77870 - protein, 36 aa, Methanobrevibacter gottschalkii; identical to SEQ ID NO: 75920

SEQ ID NO: 77871 - protein, 24 aa, Methanobrevibacter gottschalkii
TAARSIFLKDIVAFQQVHGPFLFT

SEQ ID NO: 77872 - protein, 34 aa, Methanobrevibacter gottschalkii; identical to SEQ ID NO: 75923

SEQ ID NO: 77873 - protein, 31 aa, Methanobrevibacter gottschalkii; identical to SEQ ID NO: 75924

SEQ ID NO: 77874 - protein, 24 aa, Methanobrevibacter gottschalkii
LTGSVNITDIVTAVHNGLVNAKSP

SEQ ID NO: 77875 - protein, 14 aa, Methanobrevibacter gottschalkii
LIIHGISSFVGGIL

SEQ ID NO: 77876 - protein, 30 aa, Methanobrevibacter gottschalkii; identical to SEQ ID NO: 75927

SEQ ID NO: 77877 - protein, 13 aa, Methanobrevibacter gottschalkii
SSLFKLFEMYIKY

SEQ ID NO: 77878 - protein, 29 aa, Methanobrevibacter gottschalkii
MHLNIIDSIYYSIITMATVGYGDYTPHTG

SEQ ID NO: 77879 - protein, 32 aa, Methanobrevibacter gottschalkii; identical to SEQ ID NO: 75931

SEQ ID NO: 77880 - protein, 33 aa, Methanobrevibacter gottschalkii; identical to SEQ ID NO: 75932

SEQ ID NO: 77881 - protein, 34 aa, Methanobrevibacter gottschalkii; identical to SEQ ID NO: 75933

SEQ ID NO: 77882 - protein, 31 aa, Methanobrevibacter gottschalkii; identical to SEQ ID NO: 75934

SEQ ID NO: 77883 - protein, 1536 aa, Methanobrevibacter gottschalkii; identical to SEQ ID NO: 75939

SEQ ID NO: 77884 - protein, 255 aa, Methanobrevibacter gottschalkii; identical to SEQ ID NO: 75940

SEQ ID NO: 77885 - protein, 8 aa, Methanobrevibacter gottschalkii
MEAIPTIP

SEQ ID NO: 77886 - protein, 22 aa, Methanobrevibacter gottschalkii
LNVFPNLNSIVMSSEYINNSLF

SEQ ID NO: 77887 - protein, 16 aa, Methanobrevibacter gottschalkii
LMGPIASLNQVTGLHI

SEQ ID NO: 77888 - protein, 118 aa, Methanobrevibacter gottschalkii; identical to SEQ ID NO: 75945

SEQ ID NO: 77889 - protein, 11 aa, Methanobrevibacter gottschalkii
KIIPVYNINKL

SEQ ID NO: 77890 - protein, 18 aa, Methanobrevibacter gottschalkii
ACGDLPDKNTASSFMFYI

SEQ ID NO: 77891 - protein, 70 aa, Methanobrevibacter gottschalkii; identical to SEQ ID NO: 75952

SEQ ID NO: 77892 - protein, 11 aa, Methanobrevibacter gottschalkii
KIQLNSIIGSY

SEQ ID NO: 77893 - protein, 19 aa, Methanobrevibacter gottschalkii
NIISLNMGDMKPINIVSID

SEQ ID NO: 77894 - protein, 124 aa, Methanobrevibacter gottschalkii; identical to SEQ ID NO: 75957

SEQ ID NO: 77895 - protein, 943 aa, Methanobrevibacter gottschalkii; identical to SEQ ID NO: 75958

SEQ ID NO: 77896 - protein, 11 aa, Methanobrevibacter gottschalkii
SIPSPLGVPIH

SEQ ID NO: 77897 - protein, 117 aa, Methanobrevibacter gottschalkii; identical to SEQ ID NO: 75960

SEQ ID NO: 77898 - protein, 11 aa, Methanobrevibacter gottschalkii
SFDYRFEDPLN

SEQ ID NO: 77899 - protein, 18 aa, Methanobrevibacter gottschalkii
IGGIPLFNSVLKSNSTTN

SEQ ID NO: 77900 - protein, 80 aa, Methanobrevibacter gottschalkii; identical to SEQ ID NO: 75963

SEQ ID NO: 77901 - protein, 19 aa, Methanobrevibacter gottschalkii
ALPELQITYYSTFLSFFSS

SEQ ID NO: 77902 - protein, 11 aa, Methanobrevibacter gottschalkii
VAGLGADPLAA

SEQ ID NO: 77903 - protein, 15 aa, Methanobrevibacter gottschalkii
LIVMGASAVLKYAMD

SEQ ID NO: 77904 - protein, 11 aa, Methanobrevibacter gottschalkii
TIVSGPVAVAV

SEQ ID NO: 77905 - protein, 21 aa, Methanobrevibacter gottschalkii
QIAFIFSYSESSAQLEPLIAS

SEQ ID NO: 77906 - protein, 119 aa, Methanobrevibacter gottschalkii; identical to SEQ ID NO: 75969

SEQ ID NO: 77907 - protein, 366 aa, Methanobrevibacter gottschalkii; identical to SEQ ID NO: 75970

SEQ ID NO: 77908 - protein, 20 aa, Methanobrevibacter gottschalkii
MVYNELINNINLININNIIS

SEQ ID NO: 77909 - protein, 12 aa, Methanobrevibacter gottschalkii
MTFFLESFPGLL

SEQ ID NO: 77910 - protein, 13 aa, Methanobrevibacter gottschalkii
SSVETLLSNPSLL

SEQ ID NO: 77911 - protein, 13 aa, Methanobrevibacter gottschalkii
SISFGTIGVGFDK

SEQ ID NO: 77912 - protein, 261 aa, Methanobrevibacter gottschalkii; identical to SEQ ID NO: 75978

SEQ ID NO: 77913 - protein, 283 aa, Methanobrevibacter gottschalkii; identical to SEQ ID NO: 75979

SEQ ID NO: 77914 - protein, 25 aa, Methanobrevibacter gottschalkii
AYNEEETVAKVVNVVKKVSFVDEII

SEQ ID NO: 77915 - protein, 31 aa, Methanobrevibacter gottschalkii; identical to SEQ ID NO: 75981

SEQ ID NO: 77916 - protein, 33 aa, Methanobrevibacter gottschalkii; identical to SEQ ID NO: 75982

SEQ ID NO: 77917 - protein, 47 aa, Methanobrevibacter gottschalkii; identical to SEQ ID NO: 75983

SEQ ID NO: 77918 - protein, 227 aa, Methanobrevibacter gottschalkii; identical to SEQ ID NO: 75984

SEQ ID NO: 77919 - protein, 20 aa, Methanobrevibacter gottschalkii
MIIVYGKYSIYLLGGMEMLE

SEQ ID NO: 77920 - protein, 15 aa, Methanobrevibacter gottschalkii
KTTLFGPIGGHLGFF

SEQ ID NO: 77921 - protein, 28 aa, Methanobrevibacter gottschalkii
SIPSIFETPSVSILIPGVDIPGSQIYVP

SEQ ID NO: 77922 - protein, 108 aa, Methanobrevibacter gottschalkii; identical to SEQ ID NO: 75991

SEQ ID NO: 77923 - protein, 15 aa, Methanobrevibacter gottschalkii
SRSDRVIDNVVSGET

SEQ ID NO: 77924 - protein, 13 aa, Methanobrevibacter gottschalkii
VPTLASEFGMSNI

SEQ ID NO: 77925 - protein, 11 aa, Methanobrevibacter gottschalkii
YHLQYIRGYDS

SEQ ID NO: 77926 - protein, 18 aa, Methanobrevibacter gottschalkii
VMGNVPMIEKYFPLLITS

SEQ ID NO: 77927 - protein, 30 aa, Methanobrevibacter gottschalkii; identical to SEQ ID NO: 75996

SEQ ID NO: 77928 - protein, 11 aa, Methanobrevibacter gottschalkii
FLGAKGVTWTT

SEQ ID NO: 77929 - protein, 18 aa, Methanobrevibacter gottschalkii
CNALAFPVSTGPGSRMAH

SEQ ID NO: 77930 - protein, 95 aa, Methanobrevibacter gottschalkii; identical to SEQ ID NO: 75999

SEQ ID NO: 77931 - protein, 58 aa, Methanobrevibacter gottschalkii; identical to SEQ ID NO: 76000

SEQ ID NO: 77932 - protein, 336 aa, Methanobrevibacter gottschalkii; identical to SEQ ID NO: 76001

SEQ ID NO: 77933 - protein, 1858 aa, Methanobrevibacter gottschalkii; identical to SEQ ID NO: 76003

SEQ ID NO: 77934 - protein, 31 aa, Methanobrevibacter gottschalkii; identical to SEQ ID NO: 76008

SEQ ID NO: 77935 - protein, 24 aa, Methanobrevibacter gottschalkii
TLPGSVVGINALIHPNWNGLLNVN

SEQ ID NO: 77936 - protein, 36 aa, Methanobrevibacter gottschalkii; identical to SEQ ID NO: 76010

SEQ ID NO: 77937 - protein, 16 aa, Methanobrevibacter gottschalkii
LSITTTTSELTVNAES

SEQ ID NO: 77938 - protein, 186 aa, Methanobrevibacter gottschalkii; identical to SEQ ID NO: 76013

SEQ ID NO: 77939 - protein, 23 aa, Methanobrevibacter gottschalkii
SNLGSTPVVAVPYAISLITSVDL

SEQ ID NO: 77940 - protein, 11 aa, Methanobrevibacter gottschalkii
SVVAAQNPYII

SEQ ID NO: 77941 - protein, 11 aa, Methanobrevibacter gottschalkii
FLGTFYNVPTP

SEQ ID NO: 77942 - protein, 106 aa, Methanobrevibacter gottschalkii; identical to SEQ ID NO: 76018

SEQ ID NO: 77943 - protein, 49 aa, Methanobrevibacter gottschalkii; identical to SEQ ID NO: 76019

SEQ ID NO: 77944 - protein, 87 aa, Methanobrevibacter gottschalkii; identical to SEQ ID NO: 76020

SEQ ID NO: 77945 - protein, 75 aa, Methanobrevibacter gottschalkii; identical to SEQ ID NO: 76021

SEQ ID NO: 77946 - protein, 175 aa, Methanobrevibacter gottschalkii; identical to SEQ ID NO: 76022

SEQ ID NO: 77947 - protein, 897 aa, Methanobrevibacter gottschalkii; identical to SEQ ID NO: 76023

SEQ ID NO: 77948 - protein, 15 aa, Methanobrevibacter gottschalkii
TGLFLVSNPVGWSIA

SEQ ID NO: 77949 - protein, 26 aa, Methanobrevibacter gottschalkii
TYYADDLNKGWNYNRGAHFIFDVGTS

SEQ ID NO: 77950 - protein, 19 aa, Methanobrevibacter gottschalkii
YYINKYIIGDIVINKIFSR

SEQ ID NO: 77951 - protein, 12 aa, Methanobrevibacter gottschalkii
FGSSIFLFILNK

SEQ ID NO: 77952 - protein, 14 aa, Methanobrevibacter gottschalkii
FNSSIILKYLKILT

SEQ ID NO: 77953 - protein, 13 aa, Methanobrevibacter gottschalkii
TDSFLMDPISAIT

SEQ ID NO: 77954 - protein, 993 aa, Methanobrevibacter gottschalkii; identical to SEQ ID NO: 76030

SEQ ID NO: 77955 - protein, 213 aa, Methanobrevibacter gottschalkii; identical to SEQ ID NO: 76033

SEQ ID NO: 77956 - protein, 22 aa, Methanobrevibacter gottschalkii
IGNPRSGIAVYMSYLISEMNIN

SEQ ID NO: 77957 - protein, 26 aa, Methanobrevibacter gottschalkii
GMLSEWVATFLGDGLLSSFVCDGIIG

SEQ ID NO: 77958 - protein, 35 aa, Methanobrevibacter gottschalkii; identical to SEQ ID NO: 76038

SEQ ID NO: 77959 - protein, 26 aa, Methanobrevibacter gottschalkii
FGTLAGMEEDDEEGITNLIHDTFTPL

SEQ ID NO: 77960 - protein, 18 aa, Methanobrevibacter gottschalkii
QPGNIIWSYSWLHITDFG

SEQ ID NO: 77961 - protein, 14 aa, Methanobrevibacter gottschalkii
SGQLGYFGQNLSIN

SEQ ID NO: 77962 - protein, 12 aa, Methanobrevibacter gottschalkii
NMPIPFGTSGHM

SEQ ID NO: 77963 - protein, 17 aa, Methanobrevibacter gottschalkii
VGGIPLLKPSIRYLLKP

SEQ ID NO: 77964 - protein, 87 aa, Methanobrevibacter gottschalkii; identical to SEQ ID NO: 76045

SEQ ID NO: 77965 - protein, 233 aa, Methanobrevibacter gottschalkii; identical to SEQ ID NO: 76046

SEQ ID NO: 77966 - protein, 22 aa, Methanobrevibacter gottschalkii
SEVGILPYTFVNVYLSIQEIAN

SEQ ID NO: 77967 - protein, 15 aa, Methanobrevibacter gottschalkii
DLGNRITEIYHAVFV

SEQ ID NO: 77968 - DNA, 123 bp, Methanobrevibacter gottschalkii; identical to SEQ ID NO: 76050
  source 1..123: mol_type = genomic DNA

SEQ ID NO: 77969 - DNA, 102 bp, Methanobrevibacter gottschalkii; identical to SEQ ID NO: 76051
  source 1..102: mol_type = genomic DNA

SEQ ID NO: 77970 - DNA, 84 bp, Methanobrevibacter gottschalkii; identical to SEQ ID NO: 76052
  source 1..84: mol_type = genomic DNA

SEQ ID NO: 77971 - DNA, 1938 bp, Methanobrevibacter gottschalkii; identical to SEQ ID NO: 76056
  source 1..1938: mol_type = genomic DNA

SEQ ID NO: 77972 - DNA, 1374 bp, Methanobrevibacter gottschalkii; identical to SEQ ID NO: 76057
  source 1..1374: mol_type = genomic DNA

SEQ ID NO: 77973 - DNA, 2841 bp, Methanobrevibacter gottschalkii; identical to SEQ ID NO: 76058
  source 1..2841: mol_type = genomic DNA

SEQ ID NO: 77974 - DNA, 4338 bp, Methanobrevibacter gottschalkii; identical to SEQ ID NO: 76059
  source 1..4338: mol_type = genomic DNA

SEQ ID NO: 77975 - DNA, 33 bp, Methanobrevibacter gottschalkii; identical to SEQ ID NO: 76060
  source 1..33: mol_type = genomic DNA

SEQ ID NO: 77976 - DNA, 177 bp, Methanobrevibacter gottschalkii; identical to SEQ ID NO: 76061
  source 1..177: mol_type = genomic DNA

SEQ ID NO: 77977 - DNA, 732 bp, Methanobrevibacter gottschalkii; identical to SEQ ID NO: 76062
  source 1..732: mol_type = genomic DNA

SEQ ID NO: 77978 - DNA, 33 bp, Methanobrevibacter gottschalkii; identical to SEQ ID NO: 76065
  source 1..33: mol_type = genomic DNA

SEQ ID NO: 77979 - DNA, 57 bp, Methanobrevibacter gottschalkii; identical to SEQ ID NO: 76066
  source 1..57: mol_type = genomic DNA

SEQ ID NO: 77980 - DNA, 33 bp, Methanobrevibacter gottschalkii; identical to SEQ ID NO: 76067
  source 1..33: mol_type = genomic DNA

SEQ ID NO: 77981 - DNA, 63 bp, Methanobrevibacter gottschalkii; identical to SEQ ID NO: 76068
  source 1..63: mol_type = genomic DNA

SEQ ID NO: 77982 - DNA, 1113 bp, Methanobrevibacter gottschalkii; identical to SEQ ID NO: 76069
  source 1..1113: mol_type = genomic DNA

SEQ ID NO: 77983 - DNA, 129 bp, Methanobrevibacter gottschalkii; identical to SEQ ID NO: 76070
  source 1..129: mol_type = genomic DNA

SEQ ID NO: 77984 - DNA, 78 bp, Methanobrevibacter gottschalkii; identical to SEQ ID NO: 76071
  source 1..78: mol_type = genomic DNA

SEQ ID NO: 77985 - DNA, 36 bp, Methanobrevibacter gottschalkii; identical to SEQ ID NO: 76072
  source 1..36: mol_type = genomic DNA

SEQ ID NO: 77986 - DNA, 1098 bp, Methanobrevibacter gottschalkii; identical to SEQ ID NO: 76074
  source 1..1098: mol_type = genomic DNA

SEQ ID NO: 77987 - DNA, 39 bp, Methanobrevibacter gottschalkii; identical to SEQ ID NO: 76075
  source 1..39: mol_type = genomic DNA

SEQ ID NO: 77988 - DNA, 4134 bp, Methanobrevibacter gottschalkii; identical to SEQ ID NO: 76086
  source 1..4134: mol_type = genomic DNA

SEQ ID NO: 77989 - DNA, 987 bp, Methanobrevibacter gottschalkii; identical to SEQ ID NO: 76087
  source 1..987: mol_type = genomic DNA

SEQ ID NO: 77990 - DNA, 84 bp, Methanobrevibacter gottschalkii; identical to SEQ ID NO: 76088
  source 1..84: mol_type = genomic DNA

SEQ ID NO: 77991 - DNA, 60 bp, Methanobrevibacter gottschalkii; identical to SEQ ID NO: 76089
  source 1..60: mol_type = genomic DNA

SEQ ID NO: 77992 - DNA, 54 bp, Methanobrevibacter gottschalkii; identical to SEQ ID NO: 76092
  source 1..54: mol_type = genomic DNA

SEQ ID NO: 77993 - DNA, 192 bp, Methanobrevibacter gottschalkii; identical to SEQ ID NO: 76093
  source 1..192: mol_type = genomic DNA

SEQ ID NO: 77994 - DNA, 216 bp, Methanobrevibacter gottschalkii; identical to SEQ ID NO: 76094
  source 1..216: mol_type = genomic DNA

SEQ ID NO: 77995 - DNA, 42 bp, Methanobrevibacter gottschalkii; identical to SEQ ID NO: 76097
  source 1..42: mol_type = genomic DNA

SEQ ID NO: 77996 - DNA, 1380 bp, Methanobrevibacter gottschalkii; identical to SEQ ID NO: 76098
  source 1..1380: mol_type = genomic DNA

SEQ ID NO: 77997 - DNA, 156 bp, Methanobrevibacter gottschalkii; identical to SEQ ID NO: 76102
  source 1..156: mol_type = genomic DNA

SEQ ID NO: 77998 - DNA, 51 bp, Methanobrevibacter gottschalkii; identical to SEQ ID NO: 76108
  source 1..51: mol_type = genomic DNA

SEQ ID NO: 77999 - DNA, 45 bp, Methanobrevibacter gottschalkii; identical to SEQ ID NO: 76109
  source 1..45: mol_type = genomic DNA

SEQ ID NO: 78000 - DNA, 123 bp, Methanobrevibacter gottschalkii; identical to SEQ ID NO: 76110
  source 1..123: mol_type = genomic DNA

SEQ ID NO: 78001 - DNA, 45 bp, Methanobrevibacter gottschalkii; identical to SEQ ID NO: 76111
  source 1..45: mol_type = genomic DNA

SEQ ID NO: 78002 - DNA, 45 bp, Methanobrevibacter gottschalkii; identical to SEQ ID NO: 76112
  source 1..45: mol_type = genomic DNA

SEQ ID NO: 78003 - DNA, 39 bp, Methanobrevibacter gottschalkii; identical to SEQ ID NO: 76113
  source 1..39: mol_type = genomic DNA

SEQ ID NO: 78004 - DNA, 99 bp, Methanobrevibacter gottschalkii; identical to SEQ ID NO: 76114
  source 1..99: mol_type = genomic DNA

SEQ ID NO: 78005 - DNA, 36 bp, Methanobrevibacter gottschalkii; identical to SEQ ID NO: 76116
  source 1..36: mol_type = genomic DNA

SEQ ID NO: 78006 - DNA, 42 bp, Methanobrevibacter gottschalkii; identical to SEQ ID NO: 76117
  source 1..42: mol_type = genomic DNA

SEQ ID NO: 78007 - DNA, 450 bp, Methanobrevibacter gottschalkii; identical to SEQ ID NO: 76118
  source 1..450: mol_type = genomic DNA

SEQ ID NO: 78008 - DNA, 72 bp, Methanobrevibacter gottschalkii; identical to SEQ ID NO: 76119
  source 1..72: mol_type = genomic DNA

SEQ ID NO: 78009 - DNA, 45 bp, Methanobrevibacter gottschalkii; identical to SEQ ID NO: 76120
  source 1..45: mol_type = genomic DNA

SEQ ID NO: 78010 - DNA, 318 bp, Methanobrevibacter gottschalkii; identical to SEQ ID NO: 76121
  source 1..318: mol_type = genomic DNA

SEQ ID NO: 78011 - DNA, 540 bp, Methanobrevibacter gottschalkii; identical to SEQ ID NO: 76122
  source 1..540: mol_type = genomic DNA

SEQ ID NO: 78012 - DNA, 138 bp, Methanobrevibacter gottschalkii; identical to SEQ ID NO: 76124
  source 1..138: mol_type = genomic DNA

SEQ ID NO: 78013 - DNA, 270 bp, Methanobrevibacter gottschalkii; identical to SEQ ID NO: 76125
  source 1..270: mol_type = genomic DNA

SEQ ID NO: 78014 - DNA, 48 bp, Methanobrevibacter gottschalkii; identical to SEQ ID NO: 76126
  source 1..48: mol_type = genomic DNA

SEQ ID NO: 78015 - DNA, 72 bp, Methanobrevibacter gottschalkii; identical to SEQ ID NO: 76127
  source 1..72: mol_type = genomic DNA

SEQ ID NO: 78016 - DNA, 54 bp, Methanobrevibacter gottschalkii; identical to SEQ ID NO: 76128
  source 1..54: mol_type = genomic DNA

SEQ ID NO: 78017 - DNA, 66 bp, Methanobrevibacter gottschalkii; identical to SEQ ID NO: 76129
  source 1..66: mol_type = genomic DNA

SEQ ID NO: 78018 - DNA, 252 bp, Methanobrevibacter gottschalkii; identical to SEQ ID NO: 76132
  source 1..252: mol_type = genomic DNA

SEQ ID NO: 78019 - DNA, 45 bp, Methanobrevibacter gottschalkii; identical to SEQ ID NO: 76143
  source 1..45: mol_type = genomic DNA

SEQ ID NO: 78020 - DNA, 36 bp, Methanobrevibacter gottschalkii; identical to SEQ ID NO: 76144
  source 1..36: mol_type = genomic DNA

SEQ ID NO: 78021 - DNA, 36 bp, Methanobrevibacter gottschalkii; identical to SEQ ID NO: 76145
  source 1..36: mol_type = genomic DNA

SEQ ID NO: 78022 - DNA, 33 bp, Methanobrevibacter gottschalkii; identical to SEQ ID NO: 76146
  source 1..33: mol_type = genomic DNA

SEQ ID NO: 78023 - DNA, 57 bp, Methanobrevibacter gottschalkii; identical to SEQ ID NO: 76148
  source 1..57: mol_type = genomic DNA

SEQ ID NO: 78024 - DNA, 177 bp, Methanobrevibacter gottschalkii; identical to SEQ ID NO: 76151
  source 1..177: mol_type = genomic DNA

SEQ ID NO: 78025 - DNA, 306 bp, Methanobrevibacter gottschalkii; identical to SEQ ID NO: 76152
  source 1..306: mol_type = genomic DNA

SEQ ID NO: 78026 - DNA, 42 bp, Methanobrevibacter gottschalkii; identical to SEQ ID NO: 76153
  source 1..42: mol_type = genomic DNA

SEQ ID NO: 78027 - DNA, 69 bp, Methanobrevibacter gottschalkii; identical to SEQ ID NO: 76154
  source 1..69: mol_type = genomic DNA

SEQ ID NO: 78028 - DNA, 45 bp, Methanobrevibacter gottschalkii; identical to SEQ ID NO: 76155
  source 1..45: mol_type = genomic DNA

SEQ ID NO: 78029 - DNA, 2904 bp, Methanobrevibacter gottschalkii; identical to SEQ ID NO: 76158
  source 1..2904: mol_type = genomic DNA

SEQ ID NO: 78030 - DNA, 1629 bp, Methanobrevibacter gottschalkii; identical to SEQ ID NO: 76159
  source 1..1629: mol_type = genomic DNA

SEQ ID NO: 78031 - DNA, 93 bp, Methanobrevibacter gottschalkii; identical to SEQ ID NO: 76160
  source 1..93: mol_type = genomic DNA

SEQ ID NO: 78032 - DNA, 42 bp, Methanobrevibacter gottschalkii; identical to SEQ ID NO: 76161
  source 1..42: mol_type = genomic DNA

SEQ ID NO: 78033 - DNA, 450 bp, Methanobrevibacter gottschalkii; identical to SEQ ID NO: 76162
  source 1..450: mol_type = genomic DNA

SEQ ID NO: 78034 - DNA, 438 bp, Methanobrevibacter gottschalkii; identical to SEQ ID NO: 76163
  source 1..438: mol_type = genomic DNA

SEQ ID NO: 78035 - DNA, 534 bp, Methanobrevibacter gottschalkii; identical to SEQ ID NO: 76168
  source 1..534: mol_type = genomic DNA

SEQ ID NO: 78036 - DNA, 3864 bp, Methanobrevibacter gottschalkii; identical to SEQ ID NO: 76169
  source 1..3864: mol_type = genomic DNA

SEQ ID NO: 78037 - DNA, 1911 bp, Methanobrevibacter gottschalkii; identical to SEQ ID NO: 76170
  source 1..1911: mol_type = genomic DNA

SEQ ID NO: 78038 - DNA, 1041 bp, Methanobrevibacter gottschalkii; identical to SEQ ID NO: 76172
  source 1..1041: mol_type = genomic DNA

SEQ ID NO: 78039 - DNA, 144 bp, Methanobrevibacter gottschalkii; identical to SEQ ID NO: 76173
  source 1..144: mol_type = genomic DNA

SEQ ID NO: 78040 - DNA, 1182 bp, Methanobrevibacter gottschalkii; identical to SEQ ID NO: 76174
  source 1..1182: mol_type = genomic DNA

SEQ ID NO: 78041 - DNA, 2775 bp, Methanobrevibacter gottschalkii; identical to SEQ ID NO: 76175
  source 1..2775: mol_type = genomic DNA

SEQ ID NO: 78042 - DNA, 291 bp, Methanobrevibacter gottschalkii; identical to SEQ ID NO: 76176
  source 1..291: mol_type = genomic DNA

SEQ ID NO: 78043 - DNA, 4974 bp, Methanobrevibacter gottschalkii; identical to SEQ ID NO: 76179
  source 1..4974: mol_type = genomic DNA

SEQ ID NO: 78044 - DNA, 33 bp, Methanobrevibacter gottschalkii; identical to SEQ ID NO: 76180
  source 1..33: mol_type = genomic DNA

SEQ ID NO: 78045 - DNA, 36 bp, Methanobrevibacter gottschalkii; identical to SEQ ID NO: 76181
  source 1..36: mol_type = genomic DNA

SEQ ID NO: 78046 - DNA, 60 bp, Methanobrevibacter gottschalkii; identical to SEQ ID NO: 76182
  source 1..60: mol_type = genomic DNA

SEQ ID NO: 78047 - DNA, 210 bp, Methanobrevibacter gottschalkii; identical to SEQ ID NO: 76185
  source 1..210: mol_type = genomic DNA

SEQ ID NO: 78048 - DNA, 2508 bp, Methanobrevibacter gottschalkii; identical to SEQ ID NO: 76186
  source 1..2508: mol_type = genomic DNA

SEQ ID NO: 78049 - DNA, 63 bp, Methanobrevibacter gottschalkii; identical to SEQ ID NO: 76187
  source 1..63: mol_type = genomic DNA

SEQ ID NO: 78050 - DNA, 48 bp, Methanobrevibacter gottschalkii; identical to SEQ ID NO: 76188
  source 1..48: mol_type = genomic DNA

SEQ ID NO: 78051 - DNA, 36 bp, Methanobrevibacter gottschalkii; identical to SEQ ID NO: 76189
  source 1..36: mol_type = genomic DNA

SEQ ID NO: 78052 - DNA, 5472 bp, Methanobrevibacter gottschalkii; identical to SEQ ID NO: 76191
  source 1..5472: mol_type = genomic DNA

SEQ ID NO: 78053 - DNA, 2511 bp, Methanobrevibacter gottschalkii; identical to SEQ ID NO: 76192
  source 1..2511: mol_type = genomic DNA

SEQ ID NO: 78054 - DNA, 81 bp, Methanobrevibacter gottschalkii; identical to SEQ ID NO: 76194
  source 1..81: mol_type = genomic DNA

SEQ ID NO: 78055 - DNA, 48 bp, Methanobrevibacter gottschalkii; identical to SEQ ID NO: 76195
  source 1..48: mol_type = genomic DNA

SEQ ID NO: 78056 - DNA, 33 bp, Methanobrevibacter gottschalkii; identical to SEQ ID NO: 76196
  source 1..33: mol_type = genomic DNA

SEQ ID NO: 78057 - DNA, 36 bp, Methanobrevibacter gottschalkii; identical to SEQ ID NO: 76197
  source 1..36: mol_type = genomic DNA

SEQ ID NO: 78058 - DNA, 57 bp, Methanobrevibacter gottschalkii; identical to SEQ ID NO: 76198
  source 1..57: mol_type = genomic DNA

SEQ ID NO: 78059 - DNA, 198 bp, Methanobrevibacter gottschalkii; identical to SEQ ID NO: 76201
  source 1..198: mol_type = genomic DNA

SEQ ID NO: 78060 - DNA, 750 bp, Methanobrevibacter gottschalkii; identical to SEQ ID NO: 76202
  source 1..750: mol_type = genomic DNA

SEQ ID NO: 78061 - DNA, 42 bp, Methanobrevibacter gottschalkii; identical to SEQ ID NO: 76208
  source 1..42: mol_type = genomic DNA

SEQ ID NO: 78062 - DNA, 48 bp, Methanobrevibacter gottschalkii; identical to SEQ ID NO: 76209
  source 1..48: mol_type = genomic DNA

SEQ ID NO: 78063 - DNA, 60 bp, Methanobrevibacter gottschalkii; identical to SEQ ID NO: 76210
  source 1..60: mol_type = genomic DNA

SEQ ID NO: 78064 - DNA, 639 bp, Methanobrevibacter gottschalkii; identical to SEQ ID NO: 76211
  source 1..639: mol_type = genomic DNA

SEQ ID NO: 78065 - DNA, 141 bp, Methanobrevibacter gottschalkii; identical to SEQ ID NO: 76212
  source 1..141: mol_type = genomic DNA

SEQ ID NO: 78066 - DNA, 3579 bp, Methanobrevibacter gottschalkii; identical to SEQ ID NO: 76213
  source 1..3579: mol_type = genomic DNA

SEQ ID NO: 78067 - DNA, 3534 bp, Methanobrevibacter gottschalkii; identical to SEQ ID NO: 76214
  source 1..3534: mol_type = genomic DNA

SEQ ID NO: 78068 - DNA, 4746 bp, Methanobrevibacter gottschalkii; identical to SEQ ID NO: 76215
  source 1..4746: mol_type = genomic DNA

SEQ ID NO: 78069 - DNA, 450 bp, Methanobrevibacter gottschalkii; identical to SEQ ID NO: 76222
  source 1..450: mol_type = genomic DNA

SEQ ID NO: 78070 - DNA, 39 bp, Methanobrevibacter gottschalkii; identical to SEQ ID NO: 76223
  source 1..39: mol_type = genomic DNA

SEQ ID NO: 78071 - DNA, 33 bp, Methanobrevibacter gottschalkii; identical to SEQ ID NO: 76224
  source 1..33: mol_type = genomic DNA

SEQ ID NO: 78072 - DNA, 54 bp, Methanobrevibacter gottschalkii; identical to SEQ ID NO: 76225
  source 1..54: mol_type = genomic DNA

SEQ ID NO: 78073 - DNA, 621 bp, Methanobrevibacter gottschalkii; identical to SEQ ID NO: 76226
  source 1..621: mol_type = genomic DNA

SEQ ID NO: 78074 - DNA, 507 bp, Methanobrevibacter gottschalkii; identical to SEQ ID NO: 76231
  source 1..507: mol_type = genomic DNA

SEQ ID NO: 78075 - DNA, 156 bp, Methanobrevibacter gottschalkii; identical to SEQ ID NO: 76232
  source 1..156: mol_type = genomic DNA

SEQ ID NO: 78076 - DNA, 957 bp, Methanobrevibacter gottschalkii; identical to SEQ ID NO: 76233
  source 1..957: mol_type = genomic DNA

SEQ ID NO: 78077 - DNA, 48 bp, Methanobrevibacter gottschalkii; identical to SEQ ID NO: 76237
  source 1..48: mol_type = genomic DNA

SEQ ID NO: 78078 - DNA, 429 bp, Methanobrevibacter gottschalkii; identical to SEQ ID NO: 76238
  source 1..429: mol_type = genomic DNA

SEQ ID NO: 78079 - DNA, 48 bp, Methanobrevibacter gottschalkii; identical to SEQ ID NO: 76264
  source 1..48: mol_type = genomic DNA

SEQ ID NO: 78080 - DNA, 36 bp, Methanobrevibacter gottschalkii; identical to SEQ ID NO: 76265
  source 1..36: mol_type = genomic DNA

SEQ ID NO: 78081 - DNA, 81 bp, Methanobrevibacter gottschalkii; identical to SEQ ID NO: 76266
  source 1..81: mol_type = genomic DNA

SEQ ID NO: 78082 - DNA, 636 bp, Methanobrevibacter gottschalkii; identical to SEQ ID NO: 76275
  source 1..636: mol_type = genomic DNA

SEQ ID NO: 78083 - DNA, 33 bp, Methanobrevibacter gottschalkii; identical to SEQ ID NO: 76276
  source 1..33: mol_type = genomic DNA

SEQ ID NO: 78084 - DNA, 51 bp, Methanobrevibacter gottschalkii; identical to SEQ ID NO: 76277
  source 1..51: mol_type = genomic DNA

SEQ ID NO: 78085 - DNA, 36 bp, Methanobrevibacter gottschalkii; identical to SEQ ID NO: 76278
  source 1..36: mol_type = genomic DNA

SEQ ID NO: 78086 - DNA, 69 bp, Methanobrevibacter gottschalkii; identical to SEQ ID NO: 76279
  source 1..69: mol_type = genomic DNA

SEQ ID NO: 78087 - DNA, 1557 bp, Methanobrevibacter gottschalkii; identical to SEQ ID NO: 76285
  source 1..1557: mol_type = genomic DNA

SEQ ID NO: 78088 - DNA, 1545 bp, Methanobrevibacter gottschalkii; identical to SEQ ID NO: 76286
  source 1..1545: mol_type = genomic DNA

SEQ ID NO: 78089 - DNA, 1203 bp, Methanobrevibacter gottschalkii; identical to SEQ ID NO: 76294
  source 1..1203: mol_type = genomic DNA

SEQ ID NO: 78090 - DNA, 660 bp, Methanobrevibacter gottschalkii; identical to SEQ ID NO: 76295
  source 1..660: mol_type = genomic DNA

SEQ ID NO: 78091 - DNA, 36 bp, Methanobrevibacter gottschalkii; identical to SEQ ID NO: 76297
  source 1..36: mol_type = genomic DNA

SEQ ID NO: 78092 - DNA, 2838 bp, Methanobrevibacter gottschalkii; identical to SEQ ID NO: 76298
  source 1..2838: mol_type = genomic DNA

SEQ ID NO: 78093 - DNA, 84 bp, Methanobrevibacter gottschalkii; identical to SEQ ID NO: 76299
  source 1..84: mol_type = genomic DNA

SEQ ID NO: 78094 - DNA, 99 bp, Methanobrevibacter gottschalkii; identical to SEQ ID NO: 76300
  source 1..99: mol_type = genomic DNA

SEQ ID NO: 78095 - DNA, 84 bp, Methanobrevibacter gottschalkii; identical to SEQ ID NO: 76304
  source 1..84: mol_type = genomic DNA

SEQ ID NO: 78096 - DNA, 123 bp, Methanobrevibacter gottschalkii; identical to SEQ ID NO: 76305
  source 1..123: mol_type = genomic DNA

SEQ ID NO: 78097 - DNA, 666 bp, Methanobrevibacter gottschalkii; identical to SEQ ID NO: 76306
  source 1..666: mol_type = genomic DNA

SEQ ID NO: 78098 - DNA, 54 bp, Methanobrevibacter gottschalkii; identical to SEQ ID NO: 76307
  source 1..54: mol_type = genomic DNA

SEQ ID NO: 78099 - DNA, 255 bp, Methanobrevibacter gottschalkii; identical to SEQ ID NO: 76308
  source 1..255: mol_type = genomic DNA

SEQ ID NO: 78100 - DNA, 174 bp, Methanobrevibacter gottschalkii; identical to SEQ ID NO: 76309
  source 1..174: mol_type = genomic DNA

SEQ ID NO: 78101 - DNA, 327 bp, Methanobrevibacter gottschalkii; identical to SEQ ID NO: 76310
  source 1..327: mol_type = genomic DNA

SEQ ID NO: 78102 - DNA, 60 bp, Methanobrevibacter gottschalkii; identical to SEQ ID NO: 76311
  source 1..60: mol_type = genomic DNA

SEQ ID NO: 78103 - DNA, 159 bp, Methanobrevibacter gottschalkii; identical to SEQ ID NO: 76312
  source 1..159: mol_type = genomic DNA

SEQ ID NO: 78104 - DNA, 75 bp, Methanobrevibacter gottschalkii; identical to SEQ ID NO: 76313
  source 1..75: mol_type = genomic DNA

SEQ ID NO: 78105 - DNA, 78 bp, Methanobrevibacter gottschalkii; identical to SEQ ID NO: 76314
  source 1..78: mol_type = genomic DNA

SEQ ID NO: 78106 - DNA, 87 bp, Methanobrevibacter gottschalkii; identical to SEQ ID NO: 76315
  source 1..87: mol_type = genomic DNA

SEQ ID NO: 78107 - DNA, 135 bp, Methanobrevibacter gottschalkii; identical to SEQ ID NO: 76316
  source 1..135: mol_type = genomic DNA

SEQ ID NO: 78108 - DNA, 870 bp, Methanobrevibacter gottschalkii; identical to SEQ ID NO: 76317
  source 1..870: mol_type = genomic DNA

SEQ ID NO: 78109 - DNA, 897 bp, Methanobrevibacter gottschalkii; identical to SEQ ID NO: 76318
  source 1..897: mol_type = genomic DNA

SEQ ID NO: 78110 - DNA, 2550 bp, Methanobrevibacter gottschalkii; identical to SEQ ID NO: 76319
  source 1..2550: mol_type = genomic DNA

SEQ ID NO: 78111 - DNA, 369 bp, Methanobrevibacter gottschalkii; identical to SEQ ID NO: 76320
  source 1..369: mol_type = genomic DNA

SEQ ID NO: 78112 - DNA, 36 bp, Methanobrevibacter gottschalkii; identical to SEQ ID NO: 76321
  source 1..36: mol_type = genomic DNA

SEQ ID NO: 78113 - DNA, 54 bp, Methanobrevibacter gottschalkii; identical to SEQ ID NO: 76322
  source 1..54: mol_type = genomic DNA

SEQ ID NO: 78114 - DNA, 384 bp, Methanobrevibacter gottschalkii; identical to SEQ ID NO: 76323
  source 1..384: mol_type = genomic DNA

SEQ ID NO: 78115 - DNA, 60 bp, Methanobrevibacter gottschalkii; identical to SEQ ID NO: 76324
  source 1..60: mol_type = genomic DNA

SEQ ID NO: 78116 - DNA, 36 bp, Methanobrevibacter gottschalkii; identical to SEQ ID NO: 76325
  source 1..36: mol_type = genomic DNA

SEQ ID NO: 78117 - DNA, 93 bp, Methanobrevibacter gottschalkii; identical to SEQ ID NO: 76326
  source 1..93: mol_type = genomic DNA

SEQ ID NO: 78118 - DNA, 72 bp, Methanobrevibacter gottschalkii; identical to SEQ ID NO: 76327
  source 1..72: mol_type = genomic DNA

SEQ ID NO: 78119 - DNA, 111 bp, Methanobrevibacter gottschalkii; identical to SEQ ID NO: 76328
  source 1..111: mol_type = genomic DNA

SEQ ID NO: 78120 - DNA, 57 bp, Methanobrevibacter gottschalkii; identical to SEQ ID NO: 76337
  source 1..57: mol_type = genomic DNA

SEQ ID NO: 78121 - DNA, 63 bp, Methanobrevibacter gottschalkii; identical to SEQ ID NO: 76338
  source 1..63: mol_type = genomic DNA

SEQ ID NO: 78122 - DNA, 36 bp, Methanobrevibacter gottschalkii; identical to SEQ ID NO: 76339
  source 1..36: mol_type = genomic DNA

SEQ ID NO: 78123 - DNA, 42 bp, Methanobrevibacter gottschalkii; identical to SEQ ID NO: 76340
  source 1..42: mol_type = genomic DNA

SEQ ID NO: 78124 - DNA, 36 bp, Methanobrevibacter gottschalkii; identical to SEQ ID NO: 30885
  source 1..36: mol_type = genomic DNA

SEQ ID NO: 78125 - DNA, 126 bp, Methanobrevibacter gottschalkii; identical to SEQ ID NO: 76342
  source 1..126: mol_type = genomic DNA

SEQ ID NO: 78126 - DNA, 66 bp, Methanobrevibacter gottschalkii; identical to SEQ ID NO: 76343
  source 1..66: mol_type = genomic DNA

SEQ ID NO: 78127 - DNA, 51 bp, Methanobrevibacter gottschalkii; identical to SEQ ID NO: 76344
  source 1..51: mol_type = genomic DNA

SEQ ID NO: 78128 - DNA, 33 bp, Methanobrevibacter gottschalkii; identical to SEQ ID NO: 76345
  source 1..33: mol_type = genomic DNA

SEQ ID NO: 78129 - DNA, 339 bp, Methanobrevibacter gottschalkii; identical to SEQ ID NO: 76346
  source 1..339: mol_type = genomic DNA

SEQ ID NO: 78130 - DNA, 93 bp, Methanobrevibacter gottschalkii; identical to SEQ ID NO: 76348
  source 1..93: mol_type = genomic DNA

SEQ ID NO: 78131 - DNA, 354 bp, Methanobrevibacter gottschalkii; identical to SEQ ID NO: 76350
  source 1..354: mol_type = genomic DNA

SEQ ID NO: 78132 - DNA, 339 bp, Methanobrevibacter gottschalkii; identical to SEQ ID NO: 76351
  source 1..339: mol_type = genomic DNA

SEQ ID NO: 78133 - DNA, 51 bp, Methanobrevibacter gottschalkii; identical to SEQ ID NO: 76352
  source 1..51: mol_type = genomic DNA

SEQ ID NO: 78134 - DNA, 51 bp, Methanobrevibacter gottschalkii; identical to SEQ ID NO: 76353
  source 1..51: mol_type = genomic DNA

SEQ ID NO: 78135 - DNA, 63 bp, Methanobrevibacter gottschalkii; identical to SEQ ID NO: 76354
  source 1..63: mol_type = genomic DNA

SEQ ID NO: 78136 - DNA, 39 bp, Methanobrevibacter gottschalkii; identical to SEQ ID NO: 76359
  source 1..39: mol_type = genomic DNA

SEQ ID NO: 78137 - DNA, 87 bp, Methanobrevibacter gottschalkii; identical to SEQ ID NO: 76360
  source 1..87: mol_type = genomic DNA

SEQ ID NO: 78138 - DNA, 102 bp, Methanobrevibacter gottschalkii; identical to SEQ ID NO: 76361
  source 1..102: mol_type = genomic DNA

SEQ ID NO: 78139 - DNA, 87 bp, Methanobrevibacter gottschalkii; identical to SEQ ID NO: 76362
  source 1..87: mol_type = genomic DNA

SEQ ID NO: 78140 - DNA, 33 bp, Methanobrevibacter gottschalkii; identical to SEQ ID NO: 76363
  source 1..33: mol_type = genomic DNA

SEQ ID NO: 78141 - DNA, 57 bp, Methanobrevibacter gottschalkii; identical to SEQ ID NO: 76364
  source 1..57: mol_type = genomic DNA

SEQ ID NO: 78142 - DNA, 33 bp, Methanobrevibacter gottschalkii; identical to SEQ ID NO: 76365
  source 1..33: mol_type = genomic DNA

SEQ ID NO: 78143 - DNA, 51 bp, Methanobrevibacter gottschalkii; identical to SEQ ID NO: 76366
  source 1..51: mol_type = genomic DNA

SEQ ID NO: 78144 - DNA, 48 bp, Methanobrevibacter gottschalkii; identical to SEQ ID NO: 76367
  source 1..48: mol_type = genomic DNA

SEQ ID NO: 78145 - DNA, 36 bp, Methanobrevibacter gottschalkii; identical to SEQ ID NO: 76368
  source 1..36: mol_type = genomic DNA

SEQ ID NO: 78146 - DNA, 339 bp, Methanobrevibacter gottschalkii; identical to SEQ ID NO: 76369
  source 1..339: mol_type = genomic DNA

SEQ ID NO: 78147 - DNA, 519 bp, Methanobrevibacter gottschalkii; identical to SEQ ID NO: 76370
  source 1..519: mol_type = genomic DNA

SEQ ID NO: 78148 - DNA, 36 bp, Methanobrevibacter gottschalkii; identical to SEQ ID NO: 76371
  source 1..36: mol_type = genomic DNA

SEQ ID NO: 78149 - DNA, 636 bp, Methanobrevibacter gottschalkii; identical to SEQ ID NO: 76372
  source 1..636: mol_type = genomic DNA

SEQ ID NO: 78150 - DNA, 594 bp, Methanobrevibacter gottschalkii; identical to SEQ ID NO: 76373
  source 1..594: mol_type = genomic DNA

SEQ ID NO: 78151 - DNA, 39 bp, Methanobrevibacter gottschalkii; identical to SEQ ID NO: 76375
  source 1..39: mol_type = genomic DNA

SEQ ID NO: 78152 - DNA, 297 bp, Methanobrevibacter gottschalkii; identical to SEQ ID NO: 76376
  source 1..297: mol_type = genomic DNA

SEQ ID NO: 78153 - DNA, 33 bp, Methanobrevibacter gottschalkii; identical to SEQ ID NO: 76377
  source 1..33: mol_type = genomic DNA

SEQ ID NO: 78154 - DNA, 60 bp, Methanobrevibacter gottschalkii; identical to SEQ ID NO: 76378
  source 1..60: mol_type = genomic DNA

SEQ ID NO: 78155 - DNA, 36 bp, Methanobrevibacter gottschalkii; identical to SEQ ID NO: 76379
  source 1..36: mol_type = genomic DNA

SEQ ID NO: 78156 - DNA, 315 bp, Methanobrevibacter gottschalkii; identical to SEQ ID NO: 76380
  source 1..315: mol_type = genomic DNA

SEQ ID NO: 78157 - DNA, 414 bp, Methanobrevibacter gottschalkii; identical to SEQ ID NO: 76381
  source 1..414: mol_type = genomic DNA

SEQ ID NO: 78158 - DNA, 2658 bp, Methanobrevibacter gottschalkii; identical to SEQ ID NO: 76382
  source 1..2658: mol_type = genomic DNA

SEQ ID NO: 78159 - DNA, 69 bp, Methanobrevibacter gottschalkii; identical to SEQ ID NO: 76383
  source 1..69: mol_type = genomic DNA

SEQ ID NO: 78160 - DNA, 720 bp, Methanobrevibacter gottschalkii; identical to SEQ ID NO: 76385
  source 1..720: mol_type = genomic DNA

SEQ ID NO: 78161 - DNA, 36 bp, Methanobrevibacter gottschalkii; identical to SEQ ID NO: 76389
  source 1..36: mol_type = genomic DNA

SEQ ID NO: 78162 - DNA, 321 bp, Methanobrevibacter gottschalkii; identical to SEQ ID NO: 76404
  source 1..321: mol_type = genomic DNA

SEQ ID NO: 78163 - DNA, 60 bp, Methanobrevibacter gottschalkii; identical to SEQ ID NO: 76405
  source 1..60: mol_type = genomic DNA

SEQ ID NO: 78164 - DNA, 54 bp, Methanobrevibacter gottschalkii; identical to SEQ ID NO: 76406
  source 1..54: mol_type = genomic DNA

SEQ ID NO: 78165 - DNA, 39 bp, Methanobrevibacter gottschalkii; identical to SEQ ID NO: 76407
  source 1..39: mol_type = genomic DNA

SEQ ID NO: 78166 - DNA, 42 bp, Methanobrevibacter gottschalkii; identical to SEQ ID NO: 76412
  source 1..42: mol_type = genomic DNA

SEQ ID NO: 78167 - DNA, 33 bp, Methanobrevibacter gottschalkii; identical to SEQ ID NO: 76413
  source 1..33: mol_type = genomic DNA

SEQ ID NO: 78168 - DNA, 57 bp, Methanobrevibacter gottschalkii; identical to SEQ ID NO: 76414
  source 1..57: mol_type = genomic DNA

SEQ ID NO: 78169 - DNA, 36 bp, Methanobrevibacter gottschalkii; identical to SEQ ID NO: 76415
  source 1..36: mol_type = genomic DNA

SEQ ID NO: 78170 - DNA, 63 bp, Methanobrevibacter gottschalkii; identical to SEQ ID NO: 76416
  source 1..63: mol_type = genomic DNA

SEQ ID NO: 78171 - DNA, 447 bp, Methanobrevibacter gottschalkii; identical to SEQ ID NO: 76417
  source 1..447: mol_type = genomic DNA

SEQ ID NO: 78172 - DNA, 378 bp, Methanobrevibacter gottschalkii; identical to SEQ ID NO: 76418
  source 1..378: mol_type = genomic DNA

SEQ ID NO: 78173 - DNA, 69 bp, Methanobrevibacter gottschalkii; identical to SEQ ID NO: 76420
  source 1..69: mol_type = genomic DNA

SEQ ID NO: 78174 - DNA, 33 bp, Methanobrevibacter gottschalkii; identical to SEQ ID NO: 76421
  source 1..33: mol_type = genomic DNA

SEQ ID NO: 78175 - DNA, 42 bp, Methanobrevibacter gottschalkii; identical to SEQ ID NO: 76422
  source 1..42: mol_type = genomic DNA

SEQ ID NO: 78176 - DNA, 294 bp, Methanobrevibacter gottschalkii; identical to SEQ ID NO: 76430
  source 1..294: mol_type = genomic DNA

SEQ ID NO: 78177 - DNA, 897 bp, Methanobrevibacter gottschalkii; identical to SEQ ID NO: 76433
  source 1..897: mol_type = genomic DNA

SEQ ID NO: 78178 - DNA, 459 bp, Methanobrevibacter gottschalkii; identical to SEQ ID NO: 76434
  source 1..459: mol_type = genomic DNA

SEQ ID NO: 78179 - DNA, 57 bp, Methanobrevibacter gottschalkii; identical to SEQ ID NO: 76435
  source 1..57: mol_type = genomic DNA

SEQ ID NO: 78180 - DNA, 51 bp, Methanobrevibacter gottschalkii; identical to SEQ ID NO: 76436
  source 1..51: mol_type = genomic DNA

SEQ ID NO: 78181 - DNA, 75 bp, Methanobrevibacter gottschalkii; identical to SEQ ID NO: 76437
  source 1..75: mol_type = genomic DNA

SEQ ID NO: 78182 - DNA, 36 bp, Methanobrevibacter gottschalkii; identical to SEQ ID NO: 76438
  source 1..36: mol_type = genomic DNA

SEQ ID NO: 78183 - DNA, 63 bp, Methanobrevibacter gottschalkii; identical to SEQ ID NO: 76439
  source 1..63: mol_type = genomic DNA

SEQ ID NO: 78184 - DNA, 72 bp, Methanobrevibacter gottschalkii; identical to SEQ ID NO: 76440
  source 1..72: mol_type = genomic DNA

SEQ ID NO: 78185 - DNA, 60 bp, Methanobrevibacter gottschalkii; identical to SEQ ID NO: 76441
  source 1..60: mol_type = genomic DNA

SEQ ID NO: 78186 - DNA, 39 bp, Methanobrevibacter gottschalkii; identical to SEQ ID NO: 76442
  source 1..39: mol_type = genomic DNA

SEQ ID NO: 78187 - DNA, 39 bp, Methanobrevibacter gottschalkii; identical to SEQ ID NO: 76443
  source 1..39: mol_type = genomic DNA

SEQ ID NO: 78188 - DNA, 39 bp, Methanobrevibacter gottschalkii; identical to SEQ ID NO: 76444
  source 1..39: mol_type = genomic DNA

SEQ ID NO: 78189 - DNA, 45 bp, Methanobrevibacter gottschalkii; identical to SEQ ID NO: 76445
  source 1..45: mol_type = genomic DNA

SEQ ID NO: 78190 - DNA, 180 bp, Methanobrevibacter gottschalkii; identical to SEQ ID NO: 76447
  source 1..180: mol_type = genomic DNA

SEQ ID NO: 78191 - DNA, 336 bp, Methanobrevibacter gottschalkii; identical to SEQ ID NO: 76449
  source 1..336: mol_type = genomic DNA

SEQ ID NO: 78192 - DNA, 93 bp, Methanobrevibacter gottschalkii; identical to SEQ ID NO: 76450
  source 1..93: mol_type = genomic DNA

SEQ ID NO: 78193 - DNA, 72 bp, Methanobrevibacter gottschalkii; identical to SEQ ID NO: 76451
  source 1..72: mol_type = genomic DNA

SEQ ID NO: 78194 - DNA, 108 bp, Methanobrevibacter gottschalkii; identical to SEQ ID NO: 76452
  source 1..108: mol_type = genomic DNA

SEQ ID NO: 78195 - DNA, 72 bp, Methanobrevibacter gottschalkii; identical to SEQ ID NO: 76453
  source 1..72: mol_type = genomic DNA

SEQ ID NO: 78196 - DNA, 102 bp, Methanobrevibacter gottschalkii; identical to SEQ ID NO: 76455
  source 1..102: mol_type = genomic DNA

SEQ ID NO: 78197 - DNA, 93 bp, Methanobrevibacter gottschalkii; identical to SEQ ID NO: 76456
  source 1..93: mol_type = genomic DNA

SEQ ID NO: 78198 - DNA, 72 bp, Methanobrevibacter gottschalkii; identical to SEQ ID NO: 76457
  source 1..72: mol_type = genomic DNA

SEQ ID NO: 78199 - DNA, 42 bp, Methanobrevibacter gottschalkii; identical to SEQ ID NO: 76458
  source 1..42: mol_type = genomic DNA

SEQ ID NO: 78200 - DNA, 90 bp, Methanobrevibacter gottschalkii; identical to SEQ ID NO: 76459
  source 1..90: mol_type = genomic DNA

SEQ ID NO: 78201 - DNA, 39 bp, Methanobrevibacter gottschalkii; identical to SEQ ID NO: 76460
  source 1..39: mol_type = genomic DNA

SEQ ID NO: 78202 - DNA, 87 bp, Methanobrevibacter gottschalkii; identical to SEQ ID NO: 76461
  source 1..87: mol_type = genomic DNA

SEQ ID NO: 78203 - DNA, 96 bp, Methanobrevibacter gottschalkii; identical to SEQ ID NO: 76463
  source 1..96: mol_type = genomic DNA

SEQ ID NO: 78204 - DNA, 99 bp, Methanobrevibacter gottschalkii; identical to SEQ ID NO: 76464
  source 1..99: mol_type = genomic DNA

SEQ ID NO: 78205 - DNA, 102 bp, Methanobrevibacter gottschalkii; identical to SEQ ID NO: 76465
  source 1..102: mol_type = genomic DNA

SEQ ID NO: 78206 - DNA, 93 bp, Methanobrevibacter gottschalkii; identical to SEQ ID NO: 76466
  source 1..93: mol_type = genomic DNA

SEQ ID NO: 78207 - DNA, 4608 bp, Methanobrevibacter gottschalkii; identical to SEQ ID NO: 76471
  source 1..4608: mol_type = genomic DNA

SEQ ID NO: 78208 - DNA, 765 bp, Methanobrevibacter gottschalkii; identical to SEQ ID NO: 76472
  source 1..765: mol_type = genomic DNA

SEQ ID NO: 78209 - DNA, 24 bp, Methanobrevibacter gottschalkii
  source 1..24: mol_type = genomic DNA
atggaagctattcctacaatacct

SEQ ID NO: 78210 - DNA, 66 bp, Methanobrevibacter gottschalkii; identical to SEQ ID NO: 76475
  source 1..66: mol_type = genomic DNA

SEQ ID NO: 78211 - DNA, 48 bp, Methanobrevibacter gottschalkii; identical to SEQ ID NO: 76476
  source 1..48: mol_type = genomic DNA

SEQ ID NO: 78212 - DNA, 354 bp, Methanobrevibacter gottschalkii; identical to SEQ ID NO: 76477
  source 1..354: mol_type = genomic DNA

SEQ ID NO: 78213 - DNA, 33 bp, Methanobrevibacter gottschalkii; identical to SEQ ID NO: 76478
  source 1..33: mol_type = genomic DNA

SEQ ID NO: 78214 - DNA, 54 bp, Methanobrevibacter gottschalkii; identical to SEQ ID NO: 76479
  source 1..54: mol_type = genomic DNA

SEQ ID NO: 78215 - DNA, 210 bp, Methanobrevibacter gottschalkii; identical to SEQ ID NO: 76484
  source 1..210: mol_type = genomic DNA

SEQ ID NO: 78216 - DNA, 33 bp, Methanobrevibacter gottschalkii; identical to SEQ ID NO: 76487
  source 1..33: mol_type = genomic DNA

SEQ ID NO: 78217 - DNA, 57 bp, Methanobrevibacter gottschalkii; identical to SEQ ID NO: 76488
  source 1..57: mol_type = genomic DNA

SEQ ID NO: 78218 - DNA, 372 bp, Methanobrevibacter gottschalkii; identical to SEQ ID NO: 76489
  source 1..372: mol_type = genomic DNA

SEQ ID NO: 78219 - DNA, 2829 bp, Methanobrevibacter gottschalkii; identical to SEQ ID NO: 76490
  source 1..2829: mol_type = genomic DNA

SEQ ID NO: 78220 - DNA, 33 bp, Methanobrevibacter gottschalkii; identical to SEQ ID NO: 76491
  source 1..33: mol_type = genomic DNA

SEQ ID NO: 78221 - DNA, 351 bp, Methanobrevibacter gottschalkii; identical to SEQ ID NO: 76492
  source 1..351: mol_type = genomic DNA

SEQ ID NO: 78222 - DNA, 33 bp, Methanobrevibacter gottschalkii; identical to SEQ ID NO: 76493
  source 1..33: mol_type = genomic DNA

SEQ ID NO: 78223 - DNA, 54 bp, Methanobrevibacter gottschalkii; identical to SEQ ID NO: 76494
  source 1..54: mol_type = genomic DNA

SEQ ID NO: 78224 - DNA, 240 bp, Methanobrevibacter gottschalkii; identical to SEQ ID NO: 76495
  source 1..240: mol_type = genomic DNA

SEQ ID NO: 78225 - DNA, 57 bp, Methanobrevibacter gottschalkii; identical to SEQ ID NO: 76496
  source 1..57: mol_type = genomic DNA

SEQ ID NO: 78226 - DNA, 33 bp, Methanobrevibacter gottschalkii; identical to SEQ ID NO: 76497
  source 1..33: mol_type = genomic DNA

SEQ ID NO: 78227 - DNA, 45 bp, Methanobrevibacter gottschalkii; identical to SEQ ID NO: 76498
  source 1..45: mol_type = genomic DNA

SEQ ID NO: 78228 - DNA, 33 bp, Methanobrevibacter gottschalkii; identical to SEQ ID NO: 76499
  source 1..33: mol_type = genomic DNA

SEQ ID NO: 78229 - DNA, 63 bp, Methanobrevibacter gottschalkii; identical to SEQ ID NO: 76500
  source 1..63: mol_type = genomic DNA

SEQ ID NO: 78230 - DNA, 357 bp, Methanobrevibacter gottschalkii; identical to SEQ ID NO: 76501
  source 1..357: mol_type = genomic DNA

SEQ ID NO: 78231 - DNA, 1098 bp, Methanobrevibacter gottschalkii; identical to SEQ ID NO: 76502
  source 1..1098: mol_type = genomic DNA

SEQ ID NO: 78232 - DNA, 60 bp, Methanobrevibacter gottschalkii; identical to SEQ ID NO: 76505
  source 1..60: mol_type = genomic DNA

SEQ ID NO: 78233 - DNA, 36 bp, Methanobrevibacter gottschalkii; identical to SEQ ID NO: 76507
  source 1..36: mol_type = genomic DNA

SEQ ID NO: 78234 - DNA, 39 bp, Methanobrevibacter gottschalkii; identical to SEQ ID NO: 76508
  source 1..39: mol_type = genomic DNA

SEQ ID NO: 78235 - DNA, 39 bp, Methanobrevibacter gottschalkii; identical to SEQ ID NO: 76509
  source 1..39: mol_type = genomic DNA

SEQ ID NO: 78236 - DNA, 783 bp, Methanobrevibacter gottschalkii; identical to SEQ ID NO: 76510
  source 1..783: mol_type = genomic DNA

SEQ ID NO: 78237 - DNA, 849 bp, Methanobrevibacter gottschalkii; identical to SEQ ID NO: 76511
  source 1..849: mol_type = genomic DNA

SEQ ID NO: 78238 - DNA, 75 bp, Methanobrevibacter gottschalkii; identical to SEQ ID NO: 76512
  source 1..75: mol_type = genomic DNA

SEQ ID NO: 78239 - DNA, 93 bp, Methanobrevibacter gottschalkii; identical to SEQ ID NO: 76513
  source 1..93: mol_type = genomic DNA

SEQ ID NO: 78240 - DNA, 99 bp, Methanobrevibacter gottschalkii; identical to SEQ ID NO: 76514
  source 1..99: mol_type = genomic DNA

SEQ ID NO: 78241 - DNA, 141 bp, Methanobrevibacter gottschalkii; identical to SEQ ID NO: 76515
  source 1..141: mol_type = genomic DNA

SEQ ID NO: 78242 - DNA, 681 bp, Methanobrevibacter gottschalkii; identical to SEQ ID NO: 76516
  source 1..681: mol_type = genomic DNA

SEQ ID NO: 78243 - DNA, 60 bp, Methanobrevibacter gottschalkii; identical to SEQ ID NO: 76518
  source 1..60: mol_type = genomic DNA

SEQ ID NO: 78244 - DNA, 45 bp, Methanobrevibacter gottschalkii; identical to SEQ ID NO: 76519
  source 1..45: mol_type = genomic DNA

SEQ ID NO: 78245 - DNA, 84 bp, Methanobrevibacter gottschalkii; identical to SEQ ID NO: 76522
  source 1..84: mol_type = genomic DNA

SEQ ID NO: 78246 - DNA, 324 bp, Methanobrevibacter gottschalkii; identical to SEQ ID NO: 76523
  source 1..324: mol_type = genomic DNA

SEQ ID NO: 78247 - DNA, 45 bp, Methanobrevibacter gottschalkii; identical to SEQ ID NO: 76524
  source 1..45: mol_type = genomic DNA

SEQ ID NO: 78248 - DNA, 39 bp, Methanobrevibacter gottschalkii; identical to SEQ ID NO: 76525
  source 1..39: mol_type = genomic DNA

SEQ ID NO: 78249 - DNA, 33 bp, Methanobrevibacter gottschalkii; identical to SEQ ID NO: 76526
  source 1..33: mol_type = genomic DNA

SEQ ID NO: 78250 - DNA, 54 bp, Methanobrevibacter gottschalkii; identical to SEQ ID NO: 76527
  source 1..54: mol_type = genomic DNA

SEQ ID NO: 78251 - DNA, 90 bp, Methanobrevibacter gottschalkii; identical to SEQ ID NO: 76528
  source 1..90: mol_type = genomic DNA

SEQ ID NO: 78252 - DNA, 33 bp, Methanobrevibacter gottschalkii; identical to SEQ ID NO: 76529
  source 1..33: mol_type = genomic DNA

SEQ ID NO: 78253 - DNA, 54 bp, Methanobrevibacter gottschalkii; identical to SEQ ID NO: 76530
  source 1..54: mol_type = genomic DNA

SEQ ID NO: 78254 - DNA, 285 bp, Methanobrevibacter gottschalkii; identical to SEQ ID NO: 76531
  source 1..285: mol_type = genomic DNA

SEQ ID NO: 78255 - DNA, 174 bp, Methanobrevibacter gottschalkii; identical to SEQ ID NO: 76532
  source 1..174: mol_type = genomic DNA

SEQ ID NO: 78256 - DNA, 1008 bp, Methanobrevibacter gottschalkii; identical to SEQ ID NO: 76533
  source 1..1008: mol_type = genomic DNA

SEQ ID NO: 78257 - DNA, 5574 bp, Methanobrevibacter gottschalkii; identical to SEQ ID NO: 76535
  source 1..5574: mol_type = genomic DNA

SEQ ID NO: 78258 - DNA, 93 bp, Methanobrevibacter gottschalkii; identical to SEQ ID NO: 76540
  source 1..93: mol_type = genomic DNA

SEQ ID NO: 78259 - DNA, 72 bp, Methanobrevibacter gottschalkii; identical to SEQ ID NO: 76541
  source 1..72: mol_type = genomic DNA

SEQ ID NO: 78260 - DNA, 108 bp, Methanobrevibacter gottschalkii; identical to SEQ ID NO: 76542
  source 1..108: mol_type = genomic DNA

SEQ ID NO: 78261 - DNA, 48 bp, Methanobrevibacter gottschalkii; identical to SEQ ID NO: 76543
  source 1..48: mol_type = genomic DNA

SEQ ID NO: 78262 - DNA, 558 bp, Methanobrevibacter gottschalkii; identical to SEQ ID NO: 76545
  source 1..558: mol_type = genomic DNA

SEQ ID NO: 78263 - DNA, 69 bp, Methanobrevibacter gottschalkii; identical to SEQ ID NO: 76547
  source 1..69: mol_type = genomic DNA

SEQ ID NO: 78264 - DNA, 33 bp, Methanobrevibacter gottschalkii; identical to SEQ ID NO: 76548
  source 1..33: mol_type = genomic DNA

SEQ ID NO: 78265 - DNA, 33 bp, Methanobrevibacter gottschalkii; identical to SEQ ID NO: 76549
  source 1..33: mol_type = genomic DNA

SEQ ID NO: 78266 - DNA, 318 bp, Methanobrevibacter gottschalkii; identical to SEQ ID NO: 76550
  source 1..318: mol_type = genomic DNA

SEQ ID NO: 78267 - DNA, 147 bp, Methanobrevibacter gottschalkii; identical to SEQ ID NO: 76551
  source 1..147: mol_type = genomic DNA

SEQ ID NO: 78268 - DNA, 261 bp, Methanobrevibacter gottschalkii; identical to SEQ ID NO: 76552
  source 1..261: mol_type = genomic DNA

SEQ ID NO: 78269 - DNA, 225 bp, Methanobrevibacter gottschalkii; identical to SEQ ID NO: 76553
  source 1..225: mol_type = genomic DNA

SEQ ID NO: 78270 - DNA, 525 bp, Methanobrevibacter gottschalkii; identical to SEQ ID NO: 76554
  source 1..525: mol_type = genomic DNA

SEQ ID NO: 78271 - DNA, 2691 bp, Methanobrevibacter gottschalkii; identical to SEQ ID NO: 76555
  source 1..2691: mol_type = genomic DNA

SEQ ID NO: 78272 - DNA, 45 bp, Methanobrevibacter gottschalkii; identical to SEQ ID NO: 76556
  source 1..45: mol_type = genomic DNA

SEQ ID NO: 78273 - DNA, 78 bp, Methanobrevibacter gottschalkii; identical to SEQ ID NO: 76557
  source 1..78: mol_type = genomic DNA

SEQ ID NO: 78274 - DNA, 57 bp, Methanobrevibacter gottschalkii; identical to SEQ ID NO: 76558
  source 1..57: mol_type = genomic DNA

SEQ ID NO: 78275 - DNA, 36 bp, Methanobrevibacter gottschalkii; identical to SEQ ID NO: 76559
  source 1..36: mol_type = genomic DNA

SEQ ID NO: 78276 - DNA, 42 bp, Methanobrevibacter gottschalkii; identical to SEQ ID NO: 76560
  source 1..42: mol_type = genomic DNA

SEQ ID NO: 78277 - DNA, 39 bp, Methanobrevibacter gottschalkii; identical to SEQ ID NO: 76561
  source 1..39: mol_type = genomic DNA

SEQ ID NO: 78278 - DNA, 2979 bp, Methanobrevibacter gottschalkii; identical to SEQ ID NO: 76562
  source 1..2979: mol_type = genomic DNA

SEQ ID NO: 78279 - DNA, 639 bp, Methanobrevibacter gottschalkii; identical to SEQ ID NO: 76565
  source 1..639: mol_type = genomic DNA

SEQ ID NO: 78280 - DNA, 66 bp, Methanobrevibacter gottschalkii; identical to SEQ ID NO: 76567
  source 1..66: mol_type = genomic DNA

SEQ ID NO: 78281 - DNA, 78 bp, Methanobrevibacter gottschalkii; identical to SEQ ID NO: 76569
  source 1..78: mol_type = genomic DNA

SEQ ID NO: 78282 - DNA, 105 bp, Methanobrevibacter gottschalkii; identical to SEQ ID NO: 76570
  source 1..105: mol_type = genomic DNA

SEQ ID NO: 78283 - DNA, 78 bp, Methanobrevibacter gottschalkii; identical to SEQ ID NO: 76571
  source 1..78: mol_type = genomic DNA

SEQ ID NO: 78284 - DNA, 54 bp, Methanobrevibacter gottschalkii; identical to SEQ ID NO: 76572
  source 1..54: mol_type = genomic DNA

SEQ ID NO: 78285 - DNA, 42 bp, Methanobrevibacter gottschalkii; identical to SEQ ID NO: 76573
  source 1..42: mol_type = genomic DNA

SEQ ID NO: 78286 - DNA, 36 bp, Methanobrevibacter gottschalkii; identical to SEQ ID NO: 76575
  source 1..36: mol_type = genomic DNA

SEQ ID NO: 78287 - DNA, 51 bp, Methanobrevibacter gottschalkii; identical to SEQ ID NO: 76576
  source 1..51: mol_type = genomic DNA

SEQ ID NO: 78288 - DNA, 261 bp, Methanobrevibacter gottschalkii; identical to SEQ ID NO: 76577
  source 1..261: mol_type = genomic DNA

SEQ ID NO: 78289 - DNA, 699 bp, Methanobrevibacter gottschalkii; identical to SEQ ID NO: 76578
  source 1..699: mol_type = genomic DNA

SEQ ID NO: 78290 - DNA, 66 bp, Methanobrevibacter gottschalkii; identical to SEQ ID NO: 76579
  source 1..66: mol_type = genomic DNA

SEQ ID NO: 78291 - DNA, 45 bp, Methanobrevibacter gottschalkii; identical to SEQ ID NO: 76580
  source 1..45: mol_type = genomic DNA

SEQ ID NO: 78292 - DNA, 123 bp, synthetic construct; identical to SEQ ID NO: 76582
  source 1..123: mol_type = other DNA

SEQ ID NO: 78293 - DNA, 102 bp, synthetic construct; identical to SEQ ID NO: 76583
  source 1..102: mol_type = other DNA

SEQ ID NO: 78294 - DNA, 84 bp, synthetic construct; identical to SEQ ID NO: 76584
  source 1..84: mol_type = other DNA

SEQ ID NO: 78295 - DNA, 1938 bp, synthetic construct; identical to SEQ ID NO: 76588
  source 1..1938: mol_type = other DNA

SEQ ID NO: 78296 - DNA, 1374 bp, synthetic construct; identical to SEQ ID NO: 76589
  source 1..1374: mol_type = other DNA

SEQ ID NO: 78297 - DNA, 2841 bp, synthetic construct; identical to SEQ ID NO: 76590
  source 1..2841: mol_type = other DNA

SEQ ID NO: 78298 - DNA, 4338 bp, synthetic construct; identical to SEQ ID NO: 76591
  source 1..4338: mol_type = other DNA

SEQ ID NO: 78299 - DNA, 33 bp, synthetic construct; identical to SEQ ID NO: 76592
  source 1..33: mol_type = other DNA

SEQ ID NO: 78300 - DNA, 177 bp, synthetic construct; identical to SEQ ID NO: 76593
  source 1..177: mol_type = other DNA

SEQ ID NO: 78301 - DNA, 732 bp, synthetic construct; identical to SEQ ID NO: 76594
  source 1..732: mol_type = other DNA

SEQ ID NO: 78302 - DNA, 33 bp, synthetic construct; identical to SEQ ID NO: 76597
  source 1..33: mol_type = other DNA

SEQ ID NO: 78303 - DNA, 57 bp, synthetic construct; identical to SEQ ID NO: 76598
  source 1..57: mol_type = other DNA

SEQ ID NO: 78304 - DNA, 33 bp, synthetic construct; identical to SEQ ID NO: 76599
  source 1..33: mol_type = other DNA

SEQ ID NO: 78305 - DNA, 63 bp, synthetic construct; identical to SEQ ID NO: 76600
  source 1..63: mol_type = other DNA

SEQ ID NO: 78306 - DNA, 1113 bp, synthetic construct; identical to SEQ ID NO: 76601
  source 1..1113: mol_type = other DNA

SEQ ID NO: 78307 - DNA, 129 bp, synthetic construct; identical to SEQ ID NO: 76602
  source 1..129: mol_type = other DNA

SEQ ID NO: 78308 - DNA, 78 bp, synthetic construct; identical to SEQ ID NO: 76603
  source 1..78: mol_type = other DNA

SEQ ID NO: 78309 - DNA, 36 bp, synthetic construct; identical to SEQ ID NO: 76604
  source 1..36: mol_type = other DNA

SEQ ID NO: 78310 - DNA, 1098 bp, synthetic construct; identical to SEQ ID NO: 76606
  source 1..1098: mol_type = other DNA

SEQ ID NO: 78311 - DNA, 39 bp, synthetic construct; identical to SEQ ID NO: 76607
  source 1..39: mol_type = other DNA

SEQ ID NO: 78312 - DNA, 4134 bp, synthetic construct; identical to SEQ ID NO: 76618
  source 1..4134: mol_type = other DNA

SEQ ID NO: 78313 - DNA, 987 bp, synthetic construct; identical to SEQ ID NO: 76619
  source 1..987: mol_type = other DNA

SEQ ID NO: 78314 - DNA, 84 bp, synthetic construct; identical to SEQ ID NO: 76620
  source 1..84: mol_type = other DNA

SEQ ID NO: 78315 - DNA, 60 bp, synthetic construct; identical to SEQ ID NO: 76621
  source 1..60: mol_type = other DNA

SEQ ID NO: 78316 - DNA, 54 bp, synthetic construct; identical to SEQ ID NO: 76624
  source 1..54: mol_type = other DNA

SEQ ID NO: 78317 - DNA, 192 bp, synthetic construct; identical to SEQ ID NO: 76625
  source 1..192: mol_type = other DNA

SEQ ID NO: 78318 - DNA, 216 bp, synthetic construct; identical to SEQ ID NO: 76626
  source 1..216: mol_type = other DNA

SEQ ID NO: 78319 - DNA, 42 bp, synthetic construct; identical to SEQ ID NO: 76629
  source 1..42: mol_type = other DNA

SEQ ID NO: 78320 - DNA, 1380 bp, synthetic construct; identical to SEQ ID NO: 76630
  source 1..1380: mol_type = other DNA

SEQ ID NO: 78321 - DNA, 156 bp, synthetic construct; identical to SEQ ID NO: 76634
  source 1..156: mol_type = other DNA

SEQ ID NO: 78322 - DNA, 51 bp, synthetic construct; identical to SEQ ID NO: 76640
  source 1..51: mol_type = other DNA

SEQ ID NO: 78323 - DNA, 45 bp, synthetic construct; identical to SEQ ID NO: 76641
  source 1..45: mol_type = other DNA

SEQ ID NO: 78324 - DNA, 123 bp, synthetic construct; identical to SEQ ID NO: 76642
  source 1..123: mol_type = other DNA

SEQ ID NO: 78325 - DNA, 45 bp, synthetic construct; identical to SEQ ID NO: 76643
  source 1..45: mol_type = other DNA

SEQ ID NO: 78326 - DNA, 45 bp, synthetic construct; identical to SEQ ID NO: 76644
  source 1..45: mol_type = other DNA

SEQ ID NO: 78327 - DNA, 39 bp, synthetic construct; identical to SEQ ID NO: 76645
  source 1..39: mol_type = other DNA

SEQ ID NO: 78328 - DNA, 99 bp, synthetic construct; identical to SEQ ID NO: 76646
  source 1..99: mol_type = other DNA

SEQ ID NO: 78329 - DNA, 36 bp, synthetic construct; identical to SEQ ID NO: 76648
  source 1..36: mol_type = other DNA

SEQ ID NO: 78330 - DNA, 42 bp, synthetic construct; identical to SEQ ID NO: 76649
  source 1..42: mol_type = other DNA

SEQ ID NO: 78331 - DNA, 450 bp, synthetic construct; identical to SEQ ID NO: 76650
  source 1..450: mol_type = other DNA

SEQ ID NO: 78332 - DNA, 72 bp, synthetic construct; identical to SEQ ID NO: 76651
  source 1..72: mol_type = other DNA

SEQ ID NO: 78333 - DNA, 45 bp, synthetic construct; identical to SEQ ID NO: 76652
  source 1..45: mol_type = other DNA

SEQ ID NO: 78334 - DNA, 318 bp, synthetic construct; identical to SEQ ID NO: 76653
  source 1..318: mol_type = other DNA

SEQ ID NO: 78335 - DNA, 540 bp, synthetic construct; identical to SEQ ID NO: 76654
  source 1..540: mol_type = other DNA

SEQ ID NO: 78336 - DNA, 138 bp, synthetic construct; identical to SEQ ID NO: 76655
  source 1..138: mol_type = other DNA

SEQ ID NO: 78337 - DNA, 270 bp, synthetic construct; identical to SEQ ID NO: 76656
  source 1..270: mol_type = other DNA

SEQ ID NO: 78338 - DNA, 48 bp, synthetic construct; identical to SEQ ID NO: 76657
  source 1..48: mol_type = other DNA

SEQ ID NO: 78339 - DNA, 72 bp, synthetic construct; identical to SEQ ID NO: 76658
  source 1..72: mol_type = other DNA

SEQ ID NO: 78340 - DNA, 54 bp, synthetic construct; identical to SEQ ID NO: 76659
  source 1..54: mol_type = other DNA

SEQ ID NO: 78341 - DNA, 66 bp, synthetic construct; identical to SEQ ID NO: 76660
  source 1..66: mol_type = other DNA

SEQ ID NO: 78342 - DNA, 252 bp, synthetic construct; identical to SEQ ID NO: 76663
  source 1..252: mol_type = other DNA

SEQ ID NO: 78343 - DNA, 45 bp, synthetic construct; identical to SEQ ID NO: 76674
  source 1..45: mol_type = other DNA

SEQ ID NO: 78344 - DNA, 36 bp, synthetic construct; identical to SEQ ID NO: 76675
  source 1..36: mol_type = other DNA

SEQ ID NO: 78345 - DNA, 36 bp, synthetic construct; identical to SEQ ID NO: 76676
  source 1..36: mol_type = other DNA

SEQ ID NO: 78346 - DNA, 33 bp, synthetic construct; identical to SEQ ID NO: 76677
  source 1..33: mol_type = other DNA

SEQ ID NO: 78347 - DNA, 57 bp, synthetic construct; identical to SEQ ID NO: 76679
  source 1..57: mol_type = other DNA

SEQ ID NO: 78348 - DNA, 177 bp, synthetic construct; identical to SEQ ID NO: 76682
  source 1..177: mol_type = other DNA

SEQ ID NO: 78349 - DNA, 306 bp, synthetic construct; identical to SEQ ID NO: 76683
  source 1..306: mol_type = other DNA

SEQ ID NO: 78350 - DNA, 42 bp, synthetic construct; identical to SEQ ID NO: 76684
  source 1..42: mol_type = other DNA

SEQ ID NO: 78351 - DNA, 69 bp, synthetic construct; identical to SEQ ID NO: 76685
  source 1..69: mol_type = other DNA

SEQ ID NO: 78352 - DNA, 45 bp, synthetic construct; identical to SEQ ID NO: 76686
  source 1..45: mol_type = other DNA

SEQ ID NO: 78353 - DNA, 2904 bp, synthetic construct; identical to SEQ ID NO: 76689
  source 1..2904: mol_type = other DNA

SEQ ID NO: 78354 - DNA, 1629 bp, synthetic construct; identical to SEQ ID NO: 76690
  source 1..1629: mol_type = other DNA

SEQ ID NO: 78355 - DNA, 93 bp, synthetic construct; identical to SEQ ID NO: 76691
  source 1..93: mol_type = other DNA

SEQ ID NO: 78356 - DNA, 42 bp, synthetic construct; identical to SEQ ID NO: 76692
  source 1..42: mol_type = other DNA

SEQ ID NO: 78357 - DNA, 450 bp, synthetic construct; identical to SEQ ID NO: 76693
  source 1..450: mol_type = other DNA

SEQ ID NO: 78358 - DNA, 438 bp, synthetic construct; identical to SEQ ID NO: 76694
  source 1..438: mol_type = other DNA

SEQ ID NO: 78359 - DNA, 534 bp, synthetic construct; identical to SEQ ID NO: 76699
  source 1..534: mol_type = other DNA

SEQ ID NO: 78360 - DNA, 3864 bp, synthetic construct; identical to SEQ ID NO: 76700
  source 1..3864: mol_type = other DNA

SEQ ID NO: 78361 - DNA, 1911 bp, synthetic construct; identical to SEQ ID NO: 76701
  source 1..1911: mol_type = other DNA

SEQ ID NO: 78362 - DNA, 1041 bp, synthetic construct; identical to SEQ ID NO: 76703
  source 1..1041: mol_type = other DNA

SEQ ID NO: 78363 - DNA, 144 bp, synthetic construct; identical to SEQ ID NO: 76704
  source 1..144: mol_type = other DNA

SEQ ID NO: 78364 - DNA, 1182 bp, synthetic construct; identical to SEQ ID NO: 76705
  source 1..1182: mol_type = other DNA

SEQ ID NO: 78365 - DNA, 2775 bp, synthetic construct; identical to SEQ ID NO: 76706
  source 1..2775: mol_type = other DNA

SEQ ID NO: 78366 - DNA, 291 bp, synthetic construct; identical to SEQ ID NO: 76707
  source 1..291: mol_type = other DNA

SEQ ID NO: 78367 - DNA, 4974 bp, synthetic construct; identical to SEQ ID NO: 76710
  source 1..4974: mol_type = other DNA

SEQ ID NO: 78368 - DNA, 33 bp, synthetic construct; identical to SEQ ID NO: 76711
  source 1..33: mol_type = other DNA

SEQ ID NO: 78369 - DNA, 36 bp, synthetic construct; identical to SEQ ID NO: 76712
  source 1..36: mol_type = other DNA

SEQ ID NO: 78370 - DNA, 60 bp, synthetic construct; identical to SEQ ID NO: 76713
  source 1..60: mol_type = other DNA

SEQ ID NO: 78371 - DNA, 210 bp, synthetic construct; identical to SEQ ID NO: 76716
  source 1..210: mol_type = other DNA

SEQ ID NO: 78372 - DNA, 2508 bp, synthetic construct; identical to SEQ ID NO: 76717
  source 1..2508: mol_type = other DNA

SEQ ID NO: 78373 - DNA, 63 bp, synthetic construct; identical to SEQ ID NO: 76718
  source 1..63: mol_type = other DNA

SEQ ID NO: 78374 - DNA, 48 bp, synthetic construct; identical to SEQ ID NO: 76719
  source 1..48: mol_type = other DNA

SEQ ID NO: 78375 - DNA, 36 bp, synthetic construct; identical to SEQ ID NO: 76720
  source 1..36: mol_type = other DNA

SEQ ID NO: 78376 - DNA, 5472 bp, synthetic construct; identical to SEQ ID NO: 76722
  source 1..5472: mol_type = other DNA

SEQ ID NO: 78377 - DNA, 2511 bp, synthetic construct; identical to SEQ ID NO: 76723
  source 1..2511: mol_type = other DNA

SEQ ID NO: 78378 - DNA, 81 bp, synthetic construct; identical to SEQ ID NO: 76725
  source 1..81: mol_type = other DNA

SEQ ID NO: 78379 - DNA, 48 bp, synthetic construct; identical to SEQ ID NO: 76726
  source 1..48: mol_type = other DNA

SEQ ID NO: 78380 - DNA, 33 bp, synthetic construct; identical to SEQ ID NO: 76727
  source 1..33: mol_type = other DNA

SEQ ID NO: 78381 - DNA, 36 bp, synthetic construct; identical to SEQ ID NO: 76728
  source 1..36: mol_type = other DNA

SEQ ID NO: 78382 - DNA, 57 bp, synthetic construct; identical to SEQ ID NO: 76729
  source 1..57: mol_type = other DNA

SEQ ID NO: 78383 - DNA, 198 bp, synthetic construct; identical to SEQ ID NO: 76732
  source 1..198: mol_type = other DNA

SEQ ID NO: 78384 - DNA, 750 bp, synthetic construct; identical to SEQ ID NO: 76733
  source 1..750: mol_type = other DNA

SEQ ID NO: 78385 - DNA, 42 bp, synthetic construct; identical to SEQ ID NO: 76739
  source 1..42: mol_type = other DNA

SEQ ID NO: 78386 - DNA, 48 bp, synthetic construct; identical to SEQ ID NO: 76740
  source 1..48: mol_type = other DNA

SEQ ID NO: 78387 - DNA, 60 bp, synthetic construct; identical to SEQ ID NO: 76741
  source 1..60: mol_type = other DNA

SEQ ID NO: 78388 - DNA, 639 bp, synthetic construct; identical to SEQ ID NO: 76742
  source 1..639: mol_type = other DNA

SEQ ID NO: 78389 - DNA, 141 bp, synthetic construct; identical to SEQ ID NO: 76743
  source 1..141: mol_type = other DNA

SEQ ID NO: 78390 - DNA, 3579 bp, synthetic construct; identical to SEQ ID NO: 76744
  source 1..3579: mol_type = other DNA

SEQ ID NO: 78391 - DNA, 3534 bp, synthetic construct; identical to SEQ ID NO: 76745
  source 1..3534: mol_type = other DNA

SEQ ID NO: 78392 - DNA, 4746 bp, synthetic construct; identical to SEQ ID NO: 76746
  source 1..4746: mol_type = other DNA

SEQ ID NO: 78393 - DNA, 450 bp, synthetic construct; identical to SEQ ID NO: 76753
  source 1..450: mol_type = other DNA

SEQ ID NO: 78394 - DNA, 39 bp, synthetic construct; identical to SEQ ID NO: 76754
  source 1..39: mol_type = other DNA

SEQ ID NO: 78395 - DNA, 33 bp, synthetic construct; identical to SEQ ID NO: 76755
  source 1..33: mol_type = other DNA

SEQ ID NO: 78396 - DNA, 54 bp, synthetic construct; identical to SEQ ID NO: 76756
  source 1..54: mol_type = other DNA

SEQ ID NO: 78397 - DNA, 621 bp, synthetic construct; identical to SEQ ID NO: 76757
  source 1..621: mol_type = other DNA

SEQ ID NO: 78398 - DNA, 507 bp, synthetic construct; identical to SEQ ID NO: 76762
  source 1..507: mol_type = other DNA

SEQ ID NO: 78399 - DNA, 156 bp, synthetic construct; identical to SEQ ID NO: 76763
  source 1..156: mol_type = other DNA

SEQ ID NO: 78400 - DNA, 957 bp, synthetic construct; identical to SEQ ID NO: 76764
  source 1..957: mol_type = other DNA

SEQ ID NO: 78401 - DNA, 48 bp, synthetic construct; identical to SEQ ID NO: 76768
  source 1..48: mol_type = other DNA

SEQ ID NO: 78402 - DNA, 429 bp, synthetic construct; identical to SEQ ID NO: 76769
  source 1..429: mol_type = other DNA

SEQ ID NO: 78403 - DNA, 48 bp, synthetic construct; identical to SEQ ID NO: 76795
  source 1..48: mol_type = other DNA

SEQ ID NO: 78404 - DNA, 36 bp, synthetic construct; identical to SEQ ID NO: 76796
  source 1..36: mol_type = other DNA

SEQ ID NO: 78405 - DNA, 81 bp, synthetic construct; identical to SEQ ID NO: 76797
  source 1..81: mol_type = other DNA

SEQ ID NO: 78406 - DNA, 636 bp, synthetic construct; identical to SEQ ID NO: 76806
  source 1..636: mol_type = other DNA

SEQ ID NO: 78407 - DNA, 33 bp, synthetic construct; identical to SEQ ID NO: 76807
  source 1..33: mol_type = other DNA

SEQ ID NO: 78408 - DNA, 51 bp, synthetic construct; identical to SEQ ID NO: 76808
  source 1..51: mol_type = other DNA

SEQ ID NO: 78409 - DNA, 36 bp, synthetic construct; identical to SEQ ID NO: 76809
  source 1..36: mol_type = other DNA

SEQ ID NO: 78410 - DNA, 69 bp, synthetic construct; identical to SEQ ID NO: 76810
  source 1..69: mol_type = other DNA

SEQ ID NO: 78411 - DNA, 1557 bp, synthetic construct; identical to SEQ ID NO: 76816
  source 1..1557: mol_type = other DNA

SEQ ID NO: 78412 - DNA, 1545 bp, synthetic construct; identical to SEQ ID NO: 76817
  source 1..1545: mol_type = other DNA

SEQ ID NO: 78413 - DNA, 1203 bp, synthetic construct; identical to SEQ ID NO: 76825
  source 1..1203: mol_type = other DNA

SEQ ID NO: 78414 - DNA, 660 bp, synthetic construct; identical to SEQ ID NO: 76826
  source 1..660: mol_type = other DNA

SEQ ID NO: 78415 - DNA, 36 bp, synthetic construct; identical to SEQ ID NO: 76828
  source 1..36: mol_type = other DNA

SEQ ID NO: 78416 - DNA, 2838 bp, synthetic construct; identical to SEQ ID NO: 76829
  source 1..2838: mol_type = other DNA

SEQ ID NO: 78417 - DNA, 84 bp, synthetic construct; identical to SEQ ID NO: 76830
  source 1..84: mol_type = other DNA

SEQ ID NO: 78418 - DNA, 99 bp, synthetic construct; identical to SEQ ID NO: 76831
  source 1..99: mol_type = other DNA

SEQ ID NO: 78419 - DNA, 84 bp, synthetic construct; identical to SEQ ID NO: 76835
  source 1..84: mol_type = other DNA

SEQ ID NO: 78420 - DNA, 123 bp, synthetic construct; identical to SEQ ID NO: 76836
  source 1..123: mol_type = other DNA

SEQ ID NO: 78421 - DNA, 666 bp, synthetic construct; identical to SEQ ID NO: 76837
  source 1..666: mol_type = other DNA

SEQ ID NO: 78422 - DNA, 54 bp, synthetic construct; identical to SEQ ID NO: 76838
  source 1..54: mol_type = other DNA

SEQ ID NO: 78423 - DNA, 255 bp, synthetic construct; identical to SEQ ID NO: 76839
  source 1..255: mol_type = other DNA

SEQ ID NO: 78424 - DNA, 174 bp, synthetic construct; identical to SEQ ID NO: 76840
  source 1..174: mol_type = other DNA

SEQ ID NO: 78425 - DNA, 327 bp, synthetic construct; identical to SEQ ID NO: 76841
  source 1..327: mol_type = other DNA

SEQ ID NO: 78426 - DNA, 60 bp, synthetic construct; identical to SEQ ID NO: 76842
  source 1..60: mol_type = other DNA

SEQ ID NO: 78427 - DNA, 159 bp, synthetic construct; identical to SEQ ID NO: 76843
  source 1..159: mol_type = other DNA

SEQ ID NO: 78428 - DNA, 75 bp, synthetic construct; identical to SEQ ID NO: 76844
  source 1..75: mol_type = other DNA

SEQ ID NO: 78429 - DNA, 78 bp, synthetic construct; identical to SEQ ID NO: 76845
  source 1..78: mol_type = other DNA

SEQ ID NO: 78430 - DNA, 87 bp, synthetic construct; identical to SEQ ID NO: 76846
  source 1..87: mol_type = other DNA

SEQ ID NO: 78431 - DNA, 135 bp, synthetic construct; identical to SEQ ID NO: 76847
  source 1..135: mol_type = other DNA

SEQ ID NO: 78432 - DNA, 870 bp, synthetic construct; identical to SEQ ID NO: 76848
  source 1..870: mol_type = other DNA

SEQ ID NO: 78433 - DNA, 897 bp, synthetic construct; identical to SEQ ID NO: 76849
  source 1..897: mol_type = other DNA

SEQ ID NO: 78434 - DNA, 2550 bp, synthetic construct; identical to SEQ ID NO: 76850
  source 1..2550: mol_type = other DNA

SEQ ID NO: 78435 - DNA, 369 bp, synthetic construct; identical to SEQ ID NO: 76851
  source 1..369: mol_type = other DNA

SEQ ID NO: 78436 - DNA, 36 bp, synthetic construct; identical to SEQ ID NO: 76852
  source 1..36: mol_type = other DNA

SEQ ID NO: 78437 - DNA, 54 bp, synthetic construct; identical to SEQ ID NO: 76853
  source 1..54: mol_type = other DNA

SEQ ID NO: 78438 - DNA, 384 bp, synthetic construct; identical to SEQ ID NO: 76854
  source 1..384: mol_type = other DNA

SEQ ID NO: 78439 - DNA, 60 bp, synthetic construct; identical to SEQ ID NO: 76855
  source 1..60: mol_type = other DNA

SEQ ID NO: 78440 - DNA, 36 bp, synthetic construct; identical to SEQ ID NO: 76856
  source 1..36: mol_type = other DNA

SEQ ID NO: 78441 - DNA, 93 bp, synthetic construct; identical to SEQ ID NO: 76857
  source 1..93: mol_type = other DNA

SEQ ID NO: 78442 - DNA, 72 bp, synthetic construct; identical to SEQ ID NO: 76858
  source 1..72: mol_type = other DNA

SEQ ID NO: 78443 - DNA, 111 bp, synthetic construct; identical to SEQ ID NO: 76859
  source 1..111: mol_type = other DNA

SEQ ID NO: 78444 - DNA, 57 bp, synthetic construct; identical to SEQ ID NO: 76868
  source 1..57: mol_type = other DNA

SEQ ID NO: 78445 - DNA, 63 bp, synthetic construct; identical to SEQ ID NO: 76869
  source 1..63: mol_type = other DNA

SEQ ID NO: 78446 - DNA, 36 bp, synthetic construct; identical to SEQ ID NO: 76870
  source 1..36: mol_type = other DNA

SEQ ID NO: 78447 - DNA, 42 bp, synthetic construct; identical to SEQ ID NO: 76871
  source 1..42: mol_type = other DNA

SEQ ID NO: 78448 - DNA, 36 bp, synthetic construct; identical to SEQ ID NO: 76872
  source 1..36: mol_type = other DNA

SEQ ID NO: 78449 - DNA, 126 bp, synthetic construct; identical to SEQ ID NO: 76873
  source 1..126: mol_type = other DNA

SEQ ID NO: 78450 - DNA, 66 bp, synthetic construct; identical to SEQ ID NO: 76874
  source 1..66: mol_type = other DNA

SEQ ID NO: 78451 - DNA, 51 bp, synthetic construct; identical to SEQ ID NO: 76875
  source 1..51: mol_type = other DNA

SEQ ID NO: 78452 - DNA, 33 bp, synthetic construct; identical to SEQ ID NO: 76876
  source 1..33: mol_type = other DNA

SEQ ID NO: 78453 - DNA, 339 bp, synthetic construct; identical to SEQ ID NO: 76877
  source 1..339: mol_type = other DNA

SEQ ID NO: 78454 - DNA, 93 bp, synthetic construct; identical to SEQ ID NO: 76879
  source 1..93: mol_type = other DNA

SEQ ID NO: 78455 - DNA, 354 bp, synthetic construct; identical to SEQ ID NO: 76881
  source 1..354: mol_type = other DNA

SEQ ID NO: 78456 - DNA, 339 bp, synthetic construct; identical to SEQ ID NO: 76882
  source 1..339: mol_type = other DNA

SEQ ID NO: 78457 - DNA, 51 bp, synthetic construct; identical to SEQ ID NO: 76883
  source 1..51: mol_type = other DNA

SEQ ID NO: 78458 - DNA, 51 bp, synthetic construct; identical to SEQ ID NO: 76884
  source 1..51: mol_type = other DNA

SEQ ID NO: 78459 - DNA, 63 bp, synthetic construct; identical to SEQ ID NO: 76885
  source 1..63: mol_type = other DNA

SEQ ID NO: 78460 - DNA, 39 bp, synthetic construct; identical to SEQ ID NO: 76890
  source 1..39: mol_type = other DNA

SEQ ID NO: 78461 - DNA, 87 bp, synthetic construct; identical to SEQ ID NO: 76891
  source 1..87: mol_type = other DNA

SEQ ID NO: 78462 - DNA, 102 bp, synthetic construct; identical to SEQ ID NO: 76892
  source 1..102: mol_type = other DNA

SEQ ID NO: 78463 - DNA, 87 bp, synthetic construct; identical to SEQ ID NO: 76893
  source 1..87: mol_type = other DNA

SEQ ID NO: 78464 - DNA, 33 bp, synthetic construct; identical to SEQ ID NO: 76894
  source 1..33: mol_type = other DNA

SEQ ID NO: 78465 - DNA, 57 bp, synthetic construct; identical to SEQ ID NO: 76895
  source 1..57: mol_type = other DNA

SEQ ID NO: 78466 - DNA, 33 bp, synthetic construct; identical to SEQ ID NO: 76896
  source 1..33: mol_type = other DNA

SEQ ID NO: 78467 - DNA, 51 bp, synthetic construct; identical to SEQ ID NO: 76897
  source 1..51: mol_type = other DNA

SEQ ID NO: 78468 - DNA, 48 bp, synthetic construct; identical to SEQ ID NO: 76898
  source 1..48: mol_type = other DNA

SEQ ID NO: 78469 - DNA, 36 bp, synthetic construct; identical to SEQ ID NO: 76899
  source 1..36: mol_type = other DNA

SEQ ID NO: 78470 - DNA, 339 bp, synthetic construct; identical to SEQ ID NO: 76900
  source 1..339: mol_type = other DNA

SEQ ID NO: 78471 - DNA, 519 bp, synthetic construct; identical to SEQ ID NO: 76901
  source 1..519: mol_type = other DNA

SEQ ID NO: 78472 - DNA, 36 bp, synthetic construct; identical to SEQ ID NO: 76902
  source 1..36: mol_type = other DNA

SEQ ID NO: 78473 - DNA, 636 bp, synthetic construct; identical to SEQ ID NO: 76903
  source 1..636: mol_type = other DNA

SEQ ID NO: 78474 - DNA, 594 bp, synthetic construct; identical to SEQ ID NO: 76904
  source 1..594: mol_type = other DNA

SEQ ID NO: 78475 - DNA, 39 bp, synthetic construct; identical to SEQ ID NO: 76906
  source 1..39: mol_type = other DNA

SEQ ID NO: 78476 - DNA, 297 bp, synthetic construct; identical to SEQ ID NO: 76907
  source 1..297: mol_type = other DNA

SEQ ID NO: 78477 - DNA, 33 bp, synthetic construct; identical to SEQ ID NO: 76908
  source 1..33: mol_type = other DNA

SEQ ID NO: 78478 - DNA, 60 bp, synthetic construct; identical to SEQ ID NO: 76909
  source 1..60: mol_type = other DNA

SEQ ID NO: 78479 - DNA, 36 bp, synthetic construct; identical to SEQ ID NO: 76910
  source 1..36: mol_type = other DNA

SEQ ID NO: 78480 - DNA, 315 bp, synthetic construct; identical to SEQ ID NO: 76911
  source 1..315: mol_type = other DNA

SEQ ID NO: 78481 - DNA, 414 bp, synthetic construct; identical to SEQ ID NO: 76912
  source 1..414: mol_type = other DNA

SEQ ID NO: 78482 - DNA, 2658 bp, synthetic construct; identical to SEQ ID NO: 76913
  source 1..2658: mol_type = other DNA

SEQ ID NO: 78483 - DNA, 69 bp, synthetic construct; identical to SEQ ID NO: 76914
  source 1..69: mol_type = other DNA

SEQ ID NO: 78484 - DNA, 720 bp, synthetic construct; identical to SEQ ID NO: 76916
  source 1..720: mol_type = other DNA

SEQ ID NO: 78485 - DNA, 36 bp, synthetic construct; identical to SEQ ID NO: 76920
  source 1..36: mol_type = other DNA

SEQ ID NO: 78486 - DNA, 321 bp, synthetic construct; identical to SEQ ID NO: 76935
  source 1..321: mol_type = other DNA

SEQ ID NO: 78487 - DNA, 60 bp, synthetic construct; identical to SEQ ID NO: 76936
  source 1..60: mol_type = other DNA

SEQ ID NO: 78488 - DNA, 54 bp, synthetic construct; identical to SEQ ID NO: 76937
  source 1..54: mol_type = other DNA

SEQ ID NO: 78489 - DNA, 39 bp, synthetic construct; identical to SEQ ID NO: 76938
  source 1..39: mol_type = other DNA

SEQ ID NO: 78490 - DNA, 42 bp, synthetic construct; identical to SEQ ID NO: 76943
  source 1..42: mol_type = other DNA

SEQ ID NO: 78491 - DNA, 33 bp, synthetic construct; identical to SEQ ID NO: 76944
  source 1..33: mol_type = other DNA

SEQ ID NO: 78492 - DNA, 57 bp, synthetic construct; identical to SEQ ID NO: 76945
  source 1..57: mol_type = other DNA

SEQ ID NO: 78493 - DNA, 36 bp, synthetic construct; identical to SEQ ID NO: 76946
  source 1..36: mol_type = other DNA

SEQ ID NO: 78494 - DNA, 63 bp, synthetic construct; identical to SEQ ID NO: 76947
  source 1..63: mol_type = other DNA

SEQ ID NO: 78495 - DNA, 447 bp, synthetic construct; identical to SEQ ID NO: 76948
  source 1..447: mol_type = other DNA

SEQ ID NO: 78496 - DNA, 378 bp, synthetic construct; identical to SEQ ID NO: 76949
  source 1..378: mol_type = other DNA

SEQ ID NO: 78497 - DNA, 69 bp, synthetic construct; identical to SEQ ID NO: 76951
  source 1..69: mol_type = other DNA

SEQ ID NO: 78498 - DNA, 33 bp, synthetic construct; identical to SEQ ID NO: 76952
  source 1..33: mol_type = other DNA

SEQ ID NO: 78499 - DNA, 42 bp, synthetic construct; identical to SEQ ID NO: 76953
  source 1..42: mol_type = other DNA

SEQ ID NO: 78500 - DNA, 294 bp, synthetic construct; identical to SEQ ID NO: 76961
  source 1..294: mol_type = other DNA

SEQ ID NO: 78501 - DNA, 897 bp, synthetic construct; identical to SEQ ID NO: 76964
  source 1..897: mol_type = other DNA

SEQ ID NO: 78502 - DNA, 459 bp, synthetic construct; identical to SEQ ID NO: 76965
  source 1..459: mol_type = other DNA

SEQ ID NO: 78503 - DNA, 57 bp, synthetic construct; identical to SEQ ID NO: 76966
  source 1..57: mol_type = other DNA

SEQ ID NO: 78504 - DNA, 51 bp, synthetic construct; identical to SEQ ID NO: 76967
  source 1..51: mol_type = other DNA

SEQ ID NO: 78505 - DNA, 75 bp, synthetic construct; identical to SEQ ID NO: 76968
  source 1..75: mol_type = other DNA

SEQ ID NO: 78506 - DNA, 36 bp, synthetic construct; identical to SEQ ID NO: 76969
  source 1..36: mol_type = other DNA

SEQ ID NO: 78507 - DNA, 63 bp, synthetic construct; identical to SEQ ID NO: 76970
  source 1..63: mol_type = other DNA

SEQ ID NO: 78508 - DNA, 72 bp, synthetic construct; identical to SEQ ID NO: 76971
  source 1..72: mol_type = other DNA

SEQ ID NO: 78509 - DNA, 60 bp, synthetic construct; identical to SEQ ID NO: 76972
  source 1..60: mol_type = other DNA

SEQ ID NO: 78510 - DNA, 39 bp, synthetic construct; identical to SEQ ID NO: 76973
  source 1..39: mol_type = other DNA

SEQ ID NO: 78511 - DNA, 39 bp, synthetic construct; identical to SEQ ID NO: 76974
  source 1..39: mol_type = other DNA

SEQ ID NO: 78512 - DNA, 39 bp, synthetic construct; identical to SEQ ID NO: 76975
  source 1..39: mol_type = other DNA

SEQ ID NO: 78513 - DNA, 45 bp, synthetic construct; identical to SEQ ID NO: 76976
  source 1..45: mol_type = other DNA

SEQ ID NO: 78514 - DNA, 180 bp, synthetic construct; identical to SEQ ID NO: 76978
  source 1..180: mol_type = other DNA

SEQ ID NO: 78515 - DNA, 336 bp, synthetic construct; identical to SEQ ID NO: 76980
  source 1..336: mol_type = other DNA

SEQ ID NO: 78516 - DNA, 93 bp, synthetic construct; identical to SEQ ID NO: 76981
  source 1..93: mol_type = other DNA

SEQ ID NO: 78517 - DNA, 72 bp, synthetic construct; identical to SEQ ID NO: 76982
  source 1..72: mol_type = other DNA

SEQ ID NO: 78518 - DNA, 108 bp, synthetic construct; identical to SEQ ID NO: 76983
  source 1..108: mol_type = other DNA

SEQ ID NO: 78519 - DNA, 72 bp, synthetic construct; identical to SEQ ID NO: 76984
  source 1..72: mol_type = other DNA

SEQ ID NO: 78520 - DNA, 102 bp, synthetic construct; identical to SEQ ID NO: 76986
  source 1..102: mol_type = other DNA

SEQ ID NO: 78521 - DNA, 93 bp, synthetic construct; identical to SEQ ID NO: 76987
  source 1..93: mol_type = other DNA

SEQ ID NO: 78522 - DNA, 72 bp, synthetic construct; identical to SEQ ID NO: 76988
  source 1..72: mol_type = other DNA

SEQ ID NO: 78523 - DNA, 42 bp, synthetic construct; identical to SEQ ID NO: 76989
  source 1..42: mol_type = other DNA

SEQ ID NO: 78524 - DNA, 90 bp, synthetic construct; identical to SEQ ID NO: 76990
  source 1..90: mol_type = other DNA

SEQ ID NO: 78525 - DNA, 39 bp, synthetic construct; identical to SEQ ID NO: 76991
  source 1..39: mol_type = other DNA

SEQ ID NO: 78526 - DNA, 87 bp, synthetic construct; identical to SEQ ID NO: 76992
  source 1..87: mol_type = other DNA

SEQ ID NO: 78527 - DNA, 96 bp, synthetic construct; identical to SEQ ID NO: 76994
  source 1..96: mol_type = other DNA

SEQ ID NO: 78528 - DNA, 99 bp, synthetic construct; identical to SEQ ID NO: 76995
  source 1..99: mol_type = other DNA

SEQ ID NO: 78529 - DNA, 102 bp, synthetic construct; identical to SEQ ID NO: 76996
  source 1..102: mol_type = other DNA

SEQ ID NO: 78530 - DNA, 93 bp, synthetic construct; identical to SEQ ID NO: 76997
  source 1..93: mol_type = other DNA

SEQ ID NO: 78531 - DNA, 4608 bp, synthetic construct; identical to SEQ ID NO: 77002
  source 1..4608: mol_type = other DNA

SEQ ID NO: 78532 - DNA, 765 bp, synthetic construct; identical to SEQ ID NO: 77003
  source 1..765: mol_type = other DNA

SEQ ID NO: 78533 - DNA, 24 bp, synthetic construct
  source 1..24: mol_type = other DNA
atggaagcgattccgaccatccca

SEQ ID NO: 78534 - DNA, 66 bp, synthetic construct; identical to SEQ ID NO: 77006
  source 1..66: mol_type = other DNA

SEQ ID NO: 78535 - DNA, 48 bp, synthetic construct; identical to SEQ ID NO: 77007
  source 1..48: mol_type = other DNA

SEQ ID NO: 78536 - DNA, 354 bp, synthetic construct; identical to SEQ ID NO: 77008
  source 1..354: mol_type = other DNA

SEQ ID NO: 78537 - DNA, 33 bp, synthetic construct; identical to SEQ ID NO: 77009
  source 1..33: mol_type = other DNA

SEQ ID NO: 78538 - DNA, 54 bp, synthetic construct; identical to SEQ ID NO: 77010
  source 1..54: mol_type = other DNA

SEQ ID NO: 78539 - DNA, 210 bp, synthetic construct; identical to SEQ ID NO: 77015
  source 1..210: mol_type = other DNA

SEQ ID NO: 78540 - DNA, 33 bp, synthetic construct; identical to SEQ ID NO: 77018
  source 1..33: mol_type = other DNA

SEQ ID NO: 78541 - DNA, 57 bp, synthetic construct; identical to SEQ ID NO: 77019
  source 1..57: mol_type = other DNA

SEQ ID NO: 78542 - DNA, 372 bp, synthetic construct; identical to SEQ ID NO: 77020
  source 1..372: mol_type = other DNA

SEQ ID NO: 78543 - DNA, 2829 bp, synthetic construct; identical to SEQ ID NO: 77021
  source 1..2829: mol_type = other DNA

SEQ ID NO: 78544 - DNA, 33 bp, synthetic construct; identical to SEQ ID NO: 77022
  source 1..33: mol_type = other DNA

SEQ ID NO: 78545 - DNA, 351 bp, synthetic construct; identical to SEQ ID NO: 77023
  source 1..351: mol_type = other DNA

SEQ ID NO: 78546 - DNA, 33 bp, synthetic construct; identical to SEQ ID NO: 77024
  source 1..33: mol_type = other DNA

SEQ ID NO: 78547 - DNA, 54 bp, synthetic construct; identical to SEQ ID NO: 77025
  source 1..54: mol_type = other DNA

SEQ ID NO: 78548 - DNA, 240 bp, synthetic construct; identical to SEQ ID NO: 77026
  source 1..240: mol_type = other DNA

SEQ ID NO: 78549 - DNA, 57 bp, synthetic construct; identical to SEQ ID NO: 77027
  source 1..57: mol_type = other DNA

SEQ ID NO: 78550 - DNA, 33 bp, synthetic construct; identical to SEQ ID NO: 77028
  source 1..33: mol_type = other DNA

SEQ ID NO: 78551 - DNA, 45 bp, synthetic construct; identical to SEQ ID NO: 77029
  source 1..45: mol_type = other DNA

SEQ ID NO: 78552 - DNA, 33 bp, synthetic construct; identical to SEQ ID NO: 77030
  source 1..33: mol_type = other DNA

SEQ ID NO: 78553 - DNA, 63 bp, synthetic construct; identical to SEQ ID NO: 77031
  source 1..63: mol_type = other DNA

SEQ ID NO: 78554 - DNA, 357 bp, synthetic construct; identical to SEQ ID NO: 77032
  source 1..357: mol_type = other DNA

SEQ ID NO: 78555 - DNA, 1098 bp, synthetic construct; identical to SEQ ID NO: 77033
  source 1..1098: mol_type = other DNA

SEQ ID NO: 78556 - DNA, 60 bp, synthetic construct; identical to SEQ ID NO: 77036
  source 1..60: mol_type = other DNA

SEQ ID NO: 78557 - DNA, 36 bp, synthetic construct; identical to SEQ ID NO: 77038
  source 1..36: mol_type = other DNA

SEQ ID NO: 78558 - DNA, 39 bp, synthetic construct; identical to SEQ ID NO: 77039
  source 1..39: mol_type = other DNA

SEQ ID NO: 78559 - DNA, 39 bp, synthetic construct; identical to SEQ ID NO: 77040
  source 1..39: mol_type = other DNA

SEQ ID NO: 78560 - DNA, 783 bp, synthetic construct; identical to SEQ ID NO: 77041
  source 1..783: mol_type = other DNA

SEQ ID NO: 78561 - DNA, 849 bp, synthetic construct; identical to SEQ ID NO: 77042
  source 1..849: mol_type = other DNA

SEQ ID NO: 78562 - DNA, 75 bp, synthetic construct; identical to SEQ ID NO: 77043
  source 1..75: mol_type = other DNA

SEQ ID NO: 78563 - DNA, 93 bp, synthetic construct; identical to SEQ ID NO: 77044
  source 1..93: mol_type = other DNA

SEQ ID NO: 78564 - DNA, 99 bp, synthetic construct; identical to SEQ ID NO: 77045
  source 1..99: mol_type = other DNA

SEQ ID NO: 78565 - DNA, 141 bp, synthetic construct; identical to SEQ ID NO: 77046
  source 1..141: mol_type = other DNA

SEQ ID NO: 78566 - DNA, 681 bp, synthetic construct; identical to SEQ ID NO: 77047
  source 1..681: mol_type = other DNA

SEQ ID NO: 78567 - DNA, 60 bp, synthetic construct; identical to SEQ ID NO: 77049
  source 1..60: mol_type = other DNA

SEQ ID NO: 78568 - DNA, 45 bp, synthetic construct; identical to SEQ ID NO: 77050
  source 1..45: mol_type = other DNA

SEQ ID NO: 78569 - DNA, 84 bp, synthetic construct; identical to SEQ ID NO: 77053
  source 1..84: mol_type = other DNA

SEQ ID NO: 78570 - DNA, 324 bp, synthetic construct; identical to SEQ ID NO: 77054
  source 1..324: mol_type = other DNA

SEQ ID NO: 78571 - DNA, 45 bp, synthetic construct; identical to SEQ ID NO: 77055
  source 1..45: mol_type = other DNA

SEQ ID NO: 78572 - DNA, 39 bp, synthetic construct; identical to SEQ ID NO: 77056
  source 1..39: mol_type = other DNA

SEQ ID NO: 78573 - DNA, 33 bp, synthetic construct; identical to SEQ ID NO: 77057
  source 1..33: mol_type = other DNA

SEQ ID NO: 78574 - DNA, 54 bp, synthetic construct; identical to SEQ ID NO: 77058
  source 1..54: mol_type = other DNA

SEQ ID NO: 78575 - DNA, 90 bp, synthetic construct; identical to SEQ ID NO: 77059
  source 1..90: mol_type = other DNA

SEQ ID NO: 78576 - DNA, 33 bp, synthetic construct; identical to SEQ ID NO: 77060
  source 1..33: mol_type = other DNA

SEQ ID NO: 78577 - DNA, 54 bp, synthetic construct; identical to SEQ ID NO: 77061
  source 1..54: mol_type = other DNA

SEQ ID NO: 78578 - DNA, 285 bp, synthetic construct; identical to SEQ ID NO: 77062
  source 1..285: mol_type = other DNA

SEQ ID NO: 78579 - DNA, 174 bp, synthetic construct; identical to SEQ ID NO: 77063
  source 1..174: mol_type = other DNA

SEQ ID NO: 78580 - DNA, 1008 bp, synthetic construct; identical to SEQ ID NO: 77064
  source 1..1008: mol_type = other DNA

SEQ ID NO: 78581 - DNA, 5574 bp, synthetic construct; identical to SEQ ID NO: 77066
  source 1..5574: mol_type = other DNA

SEQ ID NO: 78582 - DNA, 93 bp, synthetic construct; identical to SEQ ID NO: 77071
  source 1..93: mol_type = other DNA

SEQ ID NO: 78583 - DNA, 72 bp, synthetic construct; identical to SEQ ID NO: 77072
  source 1..72: mol_type = other DNA

SEQ ID NO: 78584 - DNA, 108 bp, synthetic construct; identical to SEQ ID NO: 77073
  source 1..108: mol_type = other DNA

SEQ ID NO: 78585 - DNA, 48 bp, synthetic construct; identical to SEQ ID NO: 77074
  source 1..48: mol_type = other DNA

SEQ ID NO: 78586 - DNA, 558 bp, synthetic construct; identical to SEQ ID NO: 77076
  source 1..558: mol_type = other DNA

SEQ ID NO: 78587 - DNA, 69 bp, synthetic construct; identical to SEQ ID NO: 77078
  source 1..69: mol_type = other DNA

SEQ ID NO: 78588 - DNA, 33 bp, synthetic construct; identical to SEQ ID NO: 77079
  source 1..33: mol_type = other DNA

SEQ ID NO: 78589 - DNA, 33 bp, synthetic construct; identical to SEQ ID NO: 77080
  source 1..33: mol_type = other DNA

SEQ ID NO: 78590 - DNA, 318 bp, synthetic construct; identical to SEQ ID NO: 77081
  source 1..318: mol_type = other DNA

SEQ ID NO: 78591 - DNA, 147 bp, synthetic construct; identical to SEQ ID NO: 77082
  source 1..147: mol_type = other DNA

SEQ ID NO: 78592 - DNA, 261 bp, synthetic construct; identical to SEQ ID NO: 77083
  source 1..261: mol_type = other DNA

SEQ ID NO: 78593 - DNA, 225 bp, synthetic construct; identical to SEQ ID NO: 77084
  source 1..225: mol_type = other DNA

SEQ ID NO: 78594 - DNA, 525 bp, synthetic construct; identical to SEQ ID NO: 77085
  source 1..525: mol_type = other DNA

SEQ ID NO: 78595 - DNA, 2691 bp, synthetic construct; identical to SEQ ID NO: 77086
  source 1..2691: mol_type = other DNA

SEQ ID NO: 78596 - DNA, 45 bp, synthetic construct; identical to SEQ ID NO: 77087
  source 1..45: mol_type = other DNA

SEQ ID NO: 78597 - DNA, 78 bp, synthetic construct; identical to SEQ ID NO: 77088
  source 1..78: mol_type = other DNA

SEQ ID NO: 78598 - DNA, 57 bp, synthetic construct; identical to SEQ ID NO: 77089
  source 1..57: mol_type = other DNA

SEQ ID NO: 78599 - DNA, 36 bp, synthetic construct; identical to SEQ ID NO: 77090
  source 1..36: mol_type = other DNA

SEQ ID NO: 78600 - DNA, 42 bp, synthetic construct; identical to SEQ ID NO: 77091
  source 1..42: mol_type = other DNA

SEQ ID NO: 78601 - DNA, 39 bp, synthetic construct; identical to SEQ ID NO: 77092
  source 1..39: mol_type = other DNA

SEQ ID NO: 78602 - DNA, 2979 bp, synthetic construct; identical to SEQ ID NO: 77093
  source 1..2979: mol_type = other DNA

SEQ ID NO: 78603 - DNA, 639 bp, synthetic construct; identical to SEQ ID NO: 77096
  source 1..639: mol_type = other DNA

SEQ ID NO: 78604 - DNA, 66 bp, synthetic construct; identical to SEQ ID NO: 77098
  source 1..66: mol_type = other DNA

SEQ ID NO: 78605 - DNA, 78 bp, synthetic construct; identical to SEQ ID NO: 77100
  source 1..78: mol_type = other DNA

SEQ ID NO: 78606 - DNA, 105 bp, synthetic construct; identical to SEQ ID NO: 77101
  source 1..105: mol_type = other DNA

SEQ ID NO: 78607 - DNA, 78 bp, synthetic construct; identical to SEQ ID NO: 77102
  source 1..78: mol_type = other DNA

SEQ ID NO: 78608 - DNA, 54 bp, synthetic construct; identical to SEQ ID NO: 77103
  source 1..54: mol_type = other DNA

SEQ ID NO: 78609 - DNA, 42 bp, synthetic construct; identical to SEQ ID NO: 77104
  source 1..42: mol_type = other DNA

SEQ ID NO: 78610 - DNA, 36 bp, synthetic construct; identical to SEQ ID NO: 77106
  source 1..36: mol_type = other DNA

SEQ ID NO: 78611 - DNA, 51 bp, synthetic construct; identical to SEQ ID NO: 77107
  source 1..51: mol_type = other DNA

SEQ ID NO: 78612 - DNA, 261 bp, synthetic construct; identical to SEQ ID NO: 77108
  source 1..261: mol_type = other DNA

SEQ ID NO: 78613 - DNA, 699 bp, synthetic construct; identical to SEQ ID NO: 77109
  source 1..699: mol_type = other DNA

SEQ ID NO: 78614 - DNA, 66 bp, synthetic construct; identical to SEQ ID NO: 77110
  source 1..66: mol_type = other DNA

SEQ ID NO: 78615 - DNA, 45 bp, synthetic construct; identical to SEQ ID NO: 77111
  source 1..45: mol_type = other DNA

SEQ ID NO: 78616 - DNA, 123 bp, synthetic construct; identical to SEQ ID NO: 77113
  source 1..123: mol_type = other DNA

SEQ ID NO: 78617 - DNA, 102 bp, synthetic construct; identical to SEQ ID NO: 77114
  source 1..102: mol_type = other DNA

SEQ ID NO: 78618 - DNA, 84 bp, synthetic construct; identical to SEQ ID NO: 77115
  source 1..84: mol_type = other DNA

SEQ ID NO: 78619 - DNA, 1938 bp, synthetic construct; identical to SEQ ID NO: 77119
  source 1..1938: mol_type = other DNA

SEQ ID NO: 78620 - DNA, 1374 bp, synthetic construct; identical to SEQ ID NO: 77120
  source 1..1374: mol_type = other DNA

SEQ ID NO: 78621 - DNA, 2841 bp, synthetic construct; identical to SEQ ID NO: 77121
  source 1..2841: mol_type = other DNA

SEQ ID NO: 78622 - DNA, 4338 bp, synthetic construct; identical to SEQ ID NO: 77122
  source 1..4338: mol_type = other DNA

SEQ ID NO: 78623 - DNA, 33 bp, synthetic construct; identical to SEQ ID NO: 77123
  source 1..33: mol_type = other DNA

SEQ ID NO: 78624 - DNA, 177 bp, synthetic construct; identical to SEQ ID NO: 76593
  source 1..177: mol_type = other DNA

SEQ ID NO: 78625 - DNA, 732 bp, synthetic construct; identical to SEQ ID NO: 77125
  source 1..732: mol_type = other DNA

SEQ ID NO: 78626 - DNA, 33 bp, synthetic construct; identical to SEQ ID NO: 77128
  source 1..33: mol_type = other DNA

SEQ ID NO: 78627 - DNA, 57 bp, synthetic construct; identical to SEQ ID NO: 77129
  source 1..57: mol_type = other DNA

SEQ ID NO: 78628 - DNA, 33 bp, synthetic construct; identical to SEQ ID NO: 77130
  source 1..33: mol_type = other DNA

SEQ ID NO: 78629 - DNA, 63 bp, synthetic construct; identical to SEQ ID NO: 77131
  source 1..63: mol_type = other DNA

SEQ ID NO: 78630 - DNA, 1113 bp, synthetic construct; identical to SEQ ID NO: 76601
  source 1..1113: mol_type = other DNA

SEQ ID NO: 78631 - DNA, 129 bp, synthetic construct; identical to SEQ ID NO: 77133
  source 1..129: mol_type = other DNA

SEQ ID NO: 78632 - DNA, 78 bp, synthetic construct; identical to SEQ ID NO: 77134
  source 1..78: mol_type = other DNA

SEQ ID NO: 78633 - DNA, 36 bp, synthetic construct; identical to SEQ ID NO: 77135
  source 1..36: mol_type = other DNA

SEQ ID NO: 78634 - DNA, 1098 bp, synthetic construct; identical to SEQ ID NO: 77137
  source 1..1098: mol_type = other DNA

SEQ ID NO: 78635 - DNA, 39 bp, synthetic construct; identical to SEQ ID NO: 77138
  source 1..39: mol_type = other DNA

SEQ ID NO: 78636 - DNA, 4134 bp, synthetic construct; identical to SEQ ID NO: 77149
  source 1..4134: mol_type = other DNA

SEQ ID NO: 78637 - DNA, 987 bp, synthetic construct; identical to SEQ ID NO: 77150
  source 1..987: mol_type = other DNA

SEQ ID NO: 78638 - DNA, 84 bp, synthetic construct; identical to SEQ ID NO: 77151
  source 1..84: mol_type = other DNA

SEQ ID NO: 78639 - DNA, 60 bp, synthetic construct; identical to SEQ ID NO: 77152
  source 1..60: mol_type = other DNA

SEQ ID NO: 78640 - DNA, 54 bp, synthetic construct; identical to SEQ ID NO: 77155
  source 1..54: mol_type = other DNA

SEQ ID NO: 78641 - DNA, 192 bp, synthetic construct; identical to SEQ ID NO: 77156
  source 1..192: mol_type = other DNA

SEQ ID NO: 78642 - DNA, 216 bp, synthetic construct; identical to SEQ ID NO: 77157
  source 1..216: mol_type = other DNA

SEQ ID NO: 78643 - DNA, 42 bp, synthetic construct; identical to SEQ ID NO: 77160
  source 1..42: mol_type = other DNA

SEQ ID NO: 78644 - DNA, 1380 bp, synthetic construct; identical to SEQ ID NO: 77161
  source 1..1380: mol_type = other DNA

SEQ ID NO: 78645 - DNA, 156 bp, synthetic construct; identical to SEQ ID NO: 77165
  source 1..156: mol_type = other DNA

SEQ ID NO: 78646 - DNA, 51 bp, synthetic construct; identical to SEQ ID NO: 77171
  source 1..51: mol_type = other DNA

SEQ ID NO: 78647 - DNA, 45 bp, synthetic construct; identical to SEQ ID NO: 77172
  source 1..45: mol_type = other DNA

SEQ ID NO: 78648 - DNA, 123 bp, synthetic construct; identical to SEQ ID NO: 77173
  source 1..123: mol_type = other DNA

SEQ ID NO: 78649 - DNA, 45 bp, synthetic construct; identical to SEQ ID NO: 77174
  source 1..45: mol_type = other DNA

SEQ ID NO: 78650 - DNA, 45 bp, synthetic construct; identical to SEQ ID NO: 76644
  source 1..45: mol_type = other DNA

SEQ ID NO: 78651 - DNA, 39 bp, synthetic construct; identical to SEQ ID NO: 77176
  source 1..39: mol_type = other DNA

SEQ ID NO: 78652 - DNA, 99 bp, synthetic construct; identical to SEQ ID NO: 77177
  source 1..99: mol_type = other DNA

SEQ ID NO: 78653 - DNA, 36 bp, synthetic construct; identical to SEQ ID NO: 76648
  source 1..36: mol_type = other DNA

SEQ ID NO: 78654 - DNA, 42 bp, synthetic construct; identical to SEQ ID NO: 76649
  source 1..42: mol_type = other DNA

SEQ ID NO: 78655 - DNA, 450 bp, synthetic construct; identical to SEQ ID NO: 77181
  source 1..450: mol_type = other DNA

SEQ ID NO: 78656 - DNA, 72 bp, synthetic construct; identical to SEQ ID NO: 77182
  source 1..72: mol_type = other DNA

SEQ ID NO: 78657 - DNA, 45 bp, synthetic construct; identical to SEQ ID NO: 77183
  source 1..45: mol_type = other DNA

SEQ ID NO: 78658 - DNA, 318 bp, synthetic construct; identical to SEQ ID NO: 77184
  source 1..318: mol_type = other DNA

SEQ ID NO: 78659 - DNA, 540 bp, synthetic construct; identical to SEQ ID NO: 77185
  source 1..540: mol_type = other DNA

SEQ ID NO: 78660 - DNA, 138 bp, synthetic construct; identical to SEQ ID NO: 77186
  source 1..138: mol_type = other DNA

SEQ ID NO: 78661 - DNA, 270 bp, synthetic construct; identical to SEQ ID NO: 77187
  source 1..270: mol_type = other DNA

SEQ ID NO: 78662 - DNA, 48 bp, synthetic construct; identical to SEQ ID NO: 77188
  source 1..48: mol_type = other DNA

SEQ ID NO: 78663 - DNA, 72 bp, synthetic construct; identical to SEQ ID NO: 77189
  source 1..72: mol_type = other DNA

SEQ ID NO: 78664 - DNA, 54 bp, synthetic construct; identical to SEQ ID NO: 77190
  source 1..54: mol_type = other DNA

SEQ ID NO: 78665 - DNA, 66 bp, synthetic construct; identical to SEQ ID NO: 77191
  source 1..66: mol_type = other DNA

SEQ ID NO: 78666 - DNA, 252 bp, synthetic construct; identical to SEQ ID NO: 77194
  source 1..252: mol_type = other DNA

SEQ ID NO: 78667 - DNA, 45 bp, synthetic construct; identical to SEQ ID NO: 77205
  source 1..45: mol_type = other DNA

SEQ ID NO: 78668 - DNA, 36 bp, synthetic construct; identical to SEQ ID NO: 77206
  source 1..36: mol_type = other DNA

SEQ ID NO: 78669 - DNA, 36 bp, synthetic construct; identical to SEQ ID NO: 76676
  source 1..36: mol_type = other DNA

SEQ ID NO: 78670 - DNA, 33 bp, synthetic construct; identical to SEQ ID NO: 76677
  source 1..33: mol_type = other DNA

SEQ ID NO: 78671 - DNA, 57 bp, synthetic construct; identical to SEQ ID NO: 77210
  source 1..57: mol_type = other DNA

SEQ ID NO: 78672 - DNA, 177 bp, synthetic construct; identical to SEQ ID NO: 77213
  source 1..177: mol_type = other DNA

SEQ ID NO: 78673 - DNA, 306 bp, synthetic construct; identical to SEQ ID NO: 77214
  source 1..306: mol_type = other DNA

SEQ ID NO: 78674 - DNA, 42 bp, synthetic construct; identical to SEQ ID NO: 76684
  source 1..42: mol_type = other DNA

SEQ ID NO: 78675 - DNA, 69 bp, synthetic construct; identical to SEQ ID NO: 77216
  source 1..69: mol_type = other DNA

SEQ ID NO: 78676 - DNA, 45 bp, synthetic construct; identical to SEQ ID NO: 76686
  source 1..45: mol_type = other DNA

SEQ ID NO: 78677 - DNA, 2904 bp, synthetic construct; identical to SEQ ID NO: 77220
  source 1..2904: mol_type = other DNA

SEQ ID NO: 78678 - DNA, 1629 bp, synthetic construct; identical to SEQ ID NO: 77221
  source 1..1629: mol_type = other DNA

SEQ ID NO: 78679 - DNA, 93 bp, synthetic construct; identical to SEQ ID NO: 77222
  source 1..93: mol_type = other DNA

SEQ ID NO: 78680 - DNA, 42 bp, synthetic construct; identical to SEQ ID NO: 77223
  source 1..42: mol_type = other DNA

SEQ ID NO: 78681 - DNA, 450 bp, synthetic construct; identical to SEQ ID NO: 77224
  source 1..450: mol_type = other DNA

SEQ ID NO: 78682 - DNA, 438 bp, synthetic construct; identical to SEQ ID NO: 77225
  source 1..438: mol_type = other DNA

SEQ ID NO: 78683 - DNA, 534 bp, synthetic construct; identical to SEQ ID NO: 77230
  source 1..534: mol_type = other DNA

SEQ ID NO: 78684 - DNA, 3864 bp, synthetic construct; identical to SEQ ID NO: 77231
  source 1..3864: mol_type = other DNA

SEQ ID NO: 78685 - DNA, 1911 bp, synthetic construct; identical to SEQ ID NO: 77232
  source 1..1911: mol_type = other DNA

SEQ ID NO: 78686 - DNA, 1041 bp, synthetic construct; identical to SEQ ID NO: 77234
  source 1..1041: mol_type = other DNA

SEQ ID NO: 78687 - DNA, 144 bp, synthetic construct; identical to SEQ ID NO: 77235
  source 1..144: mol_type = other DNA

SEQ ID NO: 78688 - DNA, 1182 bp, synthetic construct; identical to SEQ ID NO: 77236
  source 1..1182: mol_type = other DNA

SEQ ID NO: 78689 - DNA, 2775 bp, synthetic construct; identical to SEQ ID NO: 77237
  source 1..2775: mol_type = other DNA

SEQ ID NO: 78690 - DNA, 291 bp, synthetic construct; identical to SEQ ID NO: 77238
  source 1..291: mol_type = other DNA

SEQ ID NO: 78691 - DNA, 4974 bp, synthetic construct; identical to SEQ ID NO: 77241
  source 1..4974: mol_type = other DNA

SEQ ID NO: 78692 - DNA, 33 bp, synthetic construct; identical to SEQ ID NO: 76711
  source 1..33: mol_type = other DNA

SEQ ID NO: 78693 - DNA, 36 bp, synthetic construct; identical to SEQ ID NO: 77243
  source 1..36: mol_type = other DNA

SEQ ID NO: 78694 - DNA, 60 bp, synthetic construct; identical to SEQ ID NO: 77244
  source 1..60: mol_type = other DNA

SEQ ID NO: 78695 - DNA, 210 bp, synthetic construct; identical to SEQ ID NO: 77247
  source 1..210: mol_type = other DNA

SEQ ID NO: 78696 - DNA, 2508 bp, synthetic construct; identical to SEQ ID NO: 77248
  source 1..2508: mol_type = other DNA

SEQ ID NO: 78697 - DNA, 63 bp, synthetic construct; identical to SEQ ID NO: 77249
  source 1..63: mol_type = other DNA

SEQ ID NO: 78698 - DNA, 48 bp, synthetic construct; identical to SEQ ID NO: 77250
  source 1..48: mol_type = other DNA

SEQ ID NO: 78699 - DNA, 36 bp, synthetic construct; identical to SEQ ID NO: 77251
  source 1..36: mol_type = other DNA

SEQ ID NO: 78700 - DNA, 5472 bp, synthetic construct; identical to SEQ ID NO: 77253
  source 1..5472: mol_type = other DNA

SEQ ID NO: 78701 - DNA, 2511 bp, synthetic construct; identical to SEQ ID NO: 77254
  source 1..2511: mol_type = other DNA

SEQ ID NO: 78702 - DNA, 81 bp, synthetic construct; identical to SEQ ID NO: 77256
  source 1..81: mol_type = other DNA

SEQ ID NO: 78703 - DNA, 48 bp, synthetic construct; identical to SEQ ID NO: 77257
  source 1..48: mol_type = other DNA

SEQ ID NO: 78704 - DNA, 33 bp, synthetic construct; identical to SEQ ID NO: 77258
  source 1..33: mol_type = other DNA

SEQ ID NO: 78705 - DNA, 36 bp, synthetic construct; identical to SEQ ID NO: 76728
  source 1..36: mol_type = other DNA

SEQ ID NO: 78706 - DNA, 57 bp, synthetic construct; identical to SEQ ID NO: 77260
  source 1..57: mol_type = other DNA

SEQ ID NO: 78707 - DNA, 198 bp, synthetic construct; identical to SEQ ID NO: 77263
  source 1..198: mol_type = other DNA

SEQ ID NO: 78708 - DNA, 750 bp, synthetic construct; identical to SEQ ID NO: 77264
  source 1..750: mol_type = other DNA

SEQ ID NO: 78709 - DNA, 42 bp, synthetic construct; identical to SEQ ID NO: 77270
  source 1..42: mol_type = other DNA

SEQ ID NO: 78710 - DNA, 48 bp, synthetic construct; identical to SEQ ID NO: 77271
  source 1..48: mol_type = other DNA

SEQ ID NO: 78711 - DNA, 60 bp, synthetic construct; identical to SEQ ID NO: 77272
  source 1..60: mol_type = other DNA

SEQ ID NO: 78712 - DNA, 639 bp, synthetic construct; identical to SEQ ID NO: 77273
  source 1..639: mol_type = other DNA

SEQ ID NO: 78713 - DNA, 141 bp, synthetic construct; identical to SEQ ID NO: 77274
  source 1..141: mol_type = other DNA

SEQ ID NO: 78714 - DNA, 3579 bp, synthetic construct; identical to SEQ ID NO: 77275
  source 1..3579: mol_type = other DNA

SEQ ID NO: 78715 - DNA, 3534 bp, synthetic construct; identical to SEQ ID NO: 77276
  source 1..3534: mol_type = other DNA

SEQ ID NO: 78716 - DNA, 4746 bp, synthetic construct; identical to SEQ ID NO: 77277
  source 1..4746: mol_type = other DNA

SEQ ID NO: 78717 - DNA, 450 bp, synthetic construct; identical to SEQ ID NO: 77284
  source 1..450: mol_type = other DNA

SEQ ID NO: 78718 - DNA, 39 bp, synthetic construct; identical to SEQ ID NO: 77285
  source 1..39: mol_type = other DNA

SEQ ID NO: 78719 - DNA, 33 bp, synthetic construct; identical to SEQ ID NO: 76755
  source 1..33: mol_type = other DNA

SEQ ID NO: 78720 - DNA, 54 bp, synthetic construct; identical to SEQ ID NO: 77287
  source 1..54: mol_type = other DNA

SEQ ID NO: 78721 - DNA, 621 bp, synthetic construct; identical to SEQ ID NO: 77288
  source 1..621: mol_type = other DNA

SEQ ID NO: 78722 - DNA, 507 bp, synthetic construct; identical to SEQ ID NO: 77293
  source 1..507: mol_type = other DNA

SEQ ID NO: 78723 - DNA, 156 bp, synthetic construct; identical to SEQ ID NO: 77294
  source 1..156: mol_type = other DNA

SEQ ID NO: 78724 - DNA, 957 bp, synthetic construct; identical to SEQ ID NO: 77295
  source 1..957: mol_type = other DNA

SEQ ID NO: 78725 - DNA, 48 bp, synthetic construct; identical to SEQ ID NO: 76768
  source 1..48: mol_type = other DNA

SEQ ID NO: 78726 - DNA, 429 bp, synthetic construct; identical to SEQ ID NO: 77300
  source 1..429: mol_type = other DNA

SEQ ID NO: 78727 - DNA, 48 bp, synthetic construct; identical to SEQ ID NO: 77326
  source 1..48: mol_type = other DNA

SEQ ID NO: 78728 - DNA, 36 bp, synthetic construct; identical to SEQ ID NO: 77327
  source 1..36: mol_type = other DNA

SEQ ID NO: 78729 - DNA, 81 bp, synthetic construct; identical to SEQ ID NO: 77328
  source 1..81: mol_type = other DNA

SEQ ID NO: 78730 - DNA, 636 bp, synthetic construct; identical to SEQ ID NO: 77337
  source 1..636: mol_type = other DNA

SEQ ID NO: 78731 - DNA, 33 bp, synthetic construct; identical to SEQ ID NO: 77338
  source 1..33: mol_type = other DNA

SEQ ID NO: 78732 - DNA, 51 bp, synthetic construct; identical to SEQ ID NO: 77339
  source 1..51: mol_type = other DNA

SEQ ID NO: 78733 - DNA, 36 bp, synthetic construct; identical to SEQ ID NO: 77340
  source 1..36: mol_type = other DNA

SEQ ID NO: 78734 - DNA, 69 bp, synthetic construct; identical to SEQ ID NO: 77341
  source 1..69: mol_type = other DNA

SEQ ID NO: 78735 - DNA, 1557 bp, synthetic construct; identical to SEQ ID NO: 77347
  source 1..1557: mol_type = other DNA

SEQ ID NO: 78736 - DNA, 1545 bp, synthetic construct; identical to SEQ ID NO: 77348
  source 1..1545: mol_type = other DNA

SEQ ID NO: 78737 - DNA, 1203 bp, synthetic construct; identical to SEQ ID NO: 77356
  source 1..1203: mol_type = other DNA

SEQ ID NO: 78738 - DNA, 660 bp, synthetic construct; identical to SEQ ID NO: 77357
  source 1..660: mol_type = other DNA

SEQ ID NO: 78739 - DNA, 36 bp, synthetic construct; identical to SEQ ID NO: 77359
  source 1..36: mol_type = other DNA

SEQ ID NO: 78740 - DNA, 2838 bp, synthetic construct; identical to SEQ ID NO: 77360
  source 1..2838: mol_type = other DNA

SEQ ID NO: 78741 - DNA, 84 bp, synthetic construct; identical to SEQ ID NO: 77361
  source 1..84: mol_type = other DNA

SEQ ID NO: 78742 - DNA, 99 bp, synthetic construct; identical to SEQ ID NO: 77362
  source 1..99: mol_type = other DNA

SEQ ID NO: 78743 - DNA, 84 bp, synthetic construct; identical to SEQ ID NO: 77366
  source 1..84: mol_type = other DNA

SEQ ID NO: 78744 - DNA, 123 bp, synthetic construct; identical to SEQ ID NO: 77367
  source 1..123: mol_type = other DNA

SEQ ID NO: 78745 - DNA, 666 bp, synthetic construct; identical to SEQ ID NO: 77368
  source 1..666: mol_type = other DNA

SEQ ID NO: 78746 - DNA, 54 bp, synthetic construct; identical to SEQ ID NO: 77369
  source 1..54: mol_type = other DNA

SEQ ID NO: 78747 - DNA, 255 bp, synthetic construct; identical to SEQ ID NO: 77370
  source 1..255: mol_type = other DNA

SEQ ID NO: 78748 - DNA, 174 bp, synthetic construct; identical to SEQ ID NO: 77371
  source 1..174: mol_type = other DNA

SEQ ID NO: 78749 - DNA, 327 bp, synthetic construct; identical to SEQ ID NO: 77372
  source 1..327: mol_type = other DNA

SEQ ID NO: 78750 - DNA, 60 bp, synthetic construct; identical to SEQ ID NO: 77373
  source 1..60: mol_type = other DNA

SEQ ID NO: 78751 - DNA, 159 bp, synthetic construct; identical to SEQ ID NO: 77374
  source 1..159: mol_type = other DNA

SEQ ID NO: 78752 - DNA, 75 bp, synthetic construct; identical to SEQ ID NO: 77375
  source 1..75: mol_type = other DNA

SEQ ID NO: 78753 - DNA, 78 bp, synthetic construct; identical to SEQ ID NO: 77376
  source 1..78: mol_type = other DNA

SEQ ID NO: 78754 - DNA, 87 bp, synthetic construct; identical to SEQ ID NO: 77377
  source 1..87: mol_type = other DNA

SEQ ID NO: 78755 - DNA, 135 bp, synthetic construct; identical to SEQ ID NO: 77378
  source 1..135: mol_type = other DNA

SEQ ID NO: 78756 - DNA, 870 bp, synthetic construct; identical to SEQ ID NO: 77379
  source 1..870: mol_type = other DNA

SEQ ID NO: 78757 - DNA, 897 bp, synthetic construct; identical to SEQ ID NO: 77380
  source 1..897: mol_type = other DNA

SEQ ID NO: 78758 - DNA, 2550 bp, synthetic construct; identical to SEQ ID NO: 77381
  source 1..2550: mol_type = other DNA

SEQ ID NO: 78759 - DNA, 369 bp, synthetic construct; identical to SEQ ID NO: 77382
  source 1..369: mol_type = other DNA

SEQ ID NO: 78760 - DNA, 36 bp, synthetic construct; identical to SEQ ID NO: 77383
  source 1..36: mol_type = other DNA

SEQ ID NO: 78761 - DNA, 54 bp, synthetic construct; identical to SEQ ID NO: 77384
  source 1..54: mol_type = other DNA

SEQ ID NO: 78762 - DNA, 384 bp, synthetic construct; identical to SEQ ID NO: 77385
  source 1..384: mol_type = other DNA

SEQ ID NO: 78763 - DNA, 60 bp, synthetic construct; identical to SEQ ID NO: 77386
  source 1..60: mol_type = other DNA

SEQ ID NO: 78764 - DNA, 36 bp, synthetic construct; identical to SEQ ID NO: 76856
  source 1..36: mol_type = other DNA

SEQ ID NO: 78765 - DNA, 93 bp, synthetic construct; identical to SEQ ID NO: 77388
  source 1..93: mol_type = other DNA

SEQ ID NO: 78766 - DNA, 72 bp, synthetic construct; identical to SEQ ID NO: 77389
  source 1..72: mol_type = other DNA

SEQ ID NO: 78767 - DNA, 111 bp, synthetic construct; identical to SEQ ID NO: 77390
  source 1..111: mol_type = other DNA

SEQ ID NO: 78768 - DNA, 57 bp, synthetic construct; identical to SEQ ID NO: 77399
  source 1..57: mol_type = other DNA

SEQ ID NO: 78769 - DNA, 63 bp, synthetic construct; identical to SEQ ID NO: 77400
  source 1..63: mol_type = other DNA

SEQ ID NO: 78770 - DNA, 36 bp, synthetic construct; identical to SEQ ID NO: 77401
  source 1..36: mol_type = other DNA

SEQ ID NO: 78771 - DNA, 42 bp, synthetic construct; identical to SEQ ID NO: 77402
  source 1..42: mol_type = other DNA

SEQ ID NO: 78772 - DNA, 36 bp, synthetic construct; identical to SEQ ID NO: 77403
  source 1..36: mol_type = other DNA

SEQ ID NO: 78773 - DNA, 126 bp, synthetic construct; identical to SEQ ID NO: 77404
  source 1..126: mol_type = other DNA

SEQ ID NO: 78774 - DNA, 66 bp, synthetic construct; identical to SEQ ID NO: 77405
  source 1..66: mol_type = other DNA

SEQ ID NO: 78775 - DNA, 51 bp, synthetic construct; identical to SEQ ID NO: 77406
  source 1..51: mol_type = other DNA

SEQ ID NO: 78776 - DNA, 33 bp, synthetic construct; identical to SEQ ID NO: 77407
  source 1..33: mol_type = other DNA

SEQ ID NO: 78777 - DNA, 339 bp, synthetic construct; identical to SEQ ID NO: 77408
  source 1..339: mol_type = other DNA

SEQ ID NO: 78778 - DNA, 93 bp, synthetic construct; identical to SEQ ID NO: 77410
  source 1..93: mol_type = other DNA

SEQ ID NO: 78779 - DNA, 354 bp, synthetic construct; identical to SEQ ID NO: 77412
  source 1..354: mol_type = other DNA

SEQ ID NO: 78780 - DNA, 339 bp, synthetic construct; identical to SEQ ID NO: 77413
  source 1..339: mol_type = other DNA

SEQ ID NO: 78781 - DNA, 51 bp, synthetic construct; identical to SEQ ID NO: 77414
  source 1..51: mol_type = other DNA

SEQ ID NO: 78782 - DNA, 51 bp, synthetic construct; identical to SEQ ID NO: 77415
  source 1..51: mol_type = other DNA

SEQ ID NO: 78783 - DNA, 63 bp, synthetic construct; identical to SEQ ID NO: 77416
  source 1..63: mol_type = other DNA

SEQ ID NO: 78784 - DNA, 39 bp, synthetic construct; identical to SEQ ID NO: 77421
  source 1..39: mol_type = other DNA

SEQ ID NO: 78785 - DNA, 87 bp, synthetic construct; identical to SEQ ID NO: 77422
  source 1..87: mol_type = other DNA

SEQ ID NO: 78786 - DNA, 102 bp, synthetic construct; identical to SEQ ID NO: 77423
  source 1..102: mol_type = other DNA

SEQ ID NO: 78787 - DNA, 87 bp, synthetic construct; identical to SEQ ID NO: 77424
  source 1..87: mol_type = other DNA

SEQ ID NO: 78788 - DNA, 33 bp, synthetic construct; identical to SEQ ID NO: 76894
  source 1..33: mol_type = other DNA

SEQ ID NO: 78789 - DNA, 57 bp, synthetic construct; identical to SEQ ID NO: 77426
  source 1..57: mol_type = other DNA

SEQ ID NO: 78790 - DNA, 33 bp, synthetic construct; identical to SEQ ID NO: 76896
  source 1..33: mol_type = other DNA

SEQ ID NO: 78791 - DNA, 51 bp, synthetic construct; identical to SEQ ID NO: 77428
  source 1..51: mol_type = other DNA

SEQ ID NO: 78792 - DNA, 48 bp, synthetic construct; identical to SEQ ID NO: 77429
  source 1..48: mol_type = other DNA

SEQ ID NO: 78793 - DNA, 36 bp, synthetic construct; identical to SEQ ID NO: 77430
  source 1..36: mol_type = other DNA

SEQ ID NO: 78794 - DNA, 339 bp, synthetic construct; identical to SEQ ID NO: 77431
  source 1..339: mol_type = other DNA

SEQ ID NO: 78795 - DNA, 519 bp, synthetic construct; identical to SEQ ID NO: 77432
  source 1..519: mol_type = other DNA

SEQ ID NO: 78796 - DNA, 36 bp, synthetic construct; identical to SEQ ID NO: 76902
  source 1..36: mol_type = other DNA

SEQ ID NO: 78797 - DNA, 636 bp, synthetic construct; identical to SEQ ID NO: 77434
  source 1..636: mol_type = other DNA

SEQ ID NO: 78798 - DNA, 594 bp, synthetic construct; identical to SEQ ID NO: 77435
  source 1..594: mol_type = other DNA

SEQ ID NO: 78799 - DNA, 39 bp, synthetic construct; identical to SEQ ID NO: 77437
  source 1..39: mol_type = other DNA

SEQ ID NO: 78800 - DNA, 297 bp, synthetic construct; identical to SEQ ID NO: 77438
  source 1..297: mol_type = other DNA

SEQ ID NO: 78801 - DNA, 33 bp, synthetic construct; identical to SEQ ID NO: 77439
  source 1..33: mol_type = other DNA

SEQ ID NO: 78802 - DNA, 60 bp, synthetic construct; identical to SEQ ID NO: 77440
  source 1..60: mol_type = other DNA

SEQ ID NO: 78803 - DNA, 36 bp, synthetic construct; identical to SEQ ID NO: 77441
  source 1..36: mol_type = other DNA

SEQ ID NO: 78804 - DNA, 315 bp, synthetic construct; identical to SEQ ID NO: 77442
  source 1..315: mol_type = other DNA

SEQ ID NO: 78805 - DNA, 414 bp, synthetic construct; identical to SEQ ID NO: 77443
  source 1..414: mol_type = other DNA

SEQ ID NO: 78806 - DNA, 2658 bp, synthetic construct; identical to SEQ ID NO: 77444
  source 1..2658: mol_type = other DNA

SEQ ID NO: 78807 - DNA, 69 bp, synthetic construct; identical to SEQ ID NO: 77445
  source 1..69: mol_type = other DNA

SEQ ID NO: 78808 - DNA, 720 bp, synthetic construct; identical to SEQ ID NO: 77447
  source 1..720: mol_type = other DNA

SEQ ID NO: 78809 - DNA, 36 bp, synthetic construct; identical to SEQ ID NO: 77451
  source 1..36: mol_type = other DNA

SEQ ID NO: 78810 - DNA, 321 bp, synthetic construct; identical to SEQ ID NO: 77466
  source 1..321: mol_type = other DNA

SEQ ID NO: 78811 - DNA, 60 bp, synthetic construct; identical to SEQ ID NO: 77467
  source 1..60: mol_type = other DNA

SEQ ID NO: 78812 - DNA, 54 bp, synthetic construct; identical to SEQ ID NO: 77468
  source 1..54: mol_type = other DNA

SEQ ID NO: 78813 - DNA, 39 bp, synthetic construct; identical to SEQ ID NO: 77469
  source 1..39: mol_type = other DNA

SEQ ID NO: 78814 - DNA, 42 bp, synthetic construct; identical to SEQ ID NO: 77474
  source 1..42: mol_type = other DNA

SEQ ID NO: 78815 - DNA, 33 bp, synthetic construct; identical to SEQ ID NO: 77475
  source 1..33: mol_type = other DNA

SEQ ID NO: 78816 - DNA, 57 bp, synthetic construct; identical to SEQ ID NO: 77476
  source 1..57: mol_type = other DNA

SEQ ID NO: 78817 - DNA, 36 bp, synthetic construct; identical to SEQ ID NO: 77477
  source 1..36: mol_type = other DNA

SEQ ID NO: 78818 - DNA, 63 bp, synthetic construct; identical to SEQ ID NO: 77478
  source 1..63: mol_type = other DNA

SEQ ID NO: 78819 - DNA, 447 bp, synthetic construct; identical to SEQ ID NO: 77479
  source 1..447: mol_type = other DNA

SEQ ID NO: 78820 - DNA, 378 bp, synthetic construct; identical to SEQ ID NO: 77480
  source 1..378: mol_type = other DNA

SEQ ID NO: 78821 - DNA, 69 bp, synthetic construct; identical to SEQ ID NO: 77482
  source 1..69: mol_type = other DNA

SEQ ID NO: 78822 - DNA, 33 bp, synthetic construct; identical to SEQ ID NO: 76952
  source 1..33: mol_type = other DNA

SEQ ID NO: 78823 - DNA, 42 bp, synthetic construct; identical to SEQ ID NO: 77484
  source 1..42: mol_type = other DNA

SEQ ID NO: 78824 - DNA, 294 bp, synthetic construct; identical to SEQ ID NO: 77492
  source 1..294: mol_type = other DNA

SEQ ID NO: 78825 - DNA, 897 bp, synthetic construct; identical to SEQ ID NO: 77495
  source 1..897: mol_type = other DNA

SEQ ID NO: 78826 - DNA, 459 bp, synthetic construct; identical to SEQ ID NO: 77496
  source 1..459: mol_type = other DNA

SEQ ID NO: 78827 - DNA, 57 bp, synthetic construct; identical to SEQ ID NO: 77497
  source 1..57: mol_type = other DNA

SEQ ID NO: 78828 - DNA, 51 bp, synthetic construct; identical to SEQ ID NO: 77498
  source 1..51: mol_type = other DNA

SEQ ID NO: 78829 - DNA, 75 bp, synthetic construct; identical to SEQ ID NO: 77499
  source 1..75: mol_type = other DNA

SEQ ID NO: 78830 - DNA, 36 bp, synthetic construct; identical to SEQ ID NO: 77500
  source 1..36: mol_type = other DNA

SEQ ID NO: 78831 - DNA, 63 bp, synthetic construct; identical to SEQ ID NO: 77501
  source 1..63: mol_type = other DNA

SEQ ID NO: 78832 - DNA, 72 bp, synthetic construct; identical to SEQ ID NO: 77502
  source 1..72: mol_type = other DNA

SEQ ID NO: 78833 - DNA, 60 bp, synthetic construct; identical to SEQ ID NO: 77503
  source 1..60: mol_type = other DNA

SEQ ID NO: 78834 - DNA, 39 bp, synthetic construct; identical to SEQ ID NO: 77504
  source 1..39: mol_type = other DNA

SEQ ID NO: 78835 - DNA, 39 bp, synthetic construct; identical to SEQ ID NO: 77505
  source 1..39: mol_type = other DNA

SEQ ID NO: 78836 - DNA, 39 bp, synthetic construct; identical to SEQ ID NO: 77506
  source 1..39: mol_type = other DNA

SEQ ID NO: 78837 - DNA, 45 bp, synthetic construct; identical to SEQ ID NO: 77507
  source 1..45: mol_type = other DNA

SEQ ID NO: 78838 - DNA, 180 bp, synthetic construct; identical to SEQ ID NO: 77509
  source 1..180: mol_type = other DNA

SEQ ID NO: 78839 - DNA, 336 bp, synthetic construct; identical to SEQ ID NO: 77511
  source 1..336: mol_type = other DNA

SEQ ID NO: 78840 - DNA, 93 bp, synthetic construct; identical to SEQ ID NO: 77512
  source 1..93: mol_type = other DNA

SEQ ID NO: 78841 - DNA, 72 bp, synthetic construct; identical to SEQ ID NO: 77513
  source 1..72: mol_type = other DNA

SEQ ID NO: 78842 - DNA, 108 bp, synthetic construct; identical to SEQ ID NO: 77514
  source 1..108: mol_type = other DNA

SEQ ID NO: 78843 - DNA, 72 bp, synthetic construct; identical to SEQ ID NO: 77515
  source 1..72: mol_type = other DNA

SEQ ID NO: 78844 - DNA, 102 bp, synthetic construct; identical to SEQ ID NO: 76986
  source 1..102: mol_type = other DNA

SEQ ID NO: 78845 - DNA, 93 bp, synthetic construct; identical to SEQ ID NO: 77518
  source 1..93: mol_type = other DNA

SEQ ID NO: 78846 - DNA, 72 bp, synthetic construct; identical to SEQ ID NO: 77519
  source 1..72: mol_type = other DNA

SEQ ID NO: 78847 - DNA, 42 bp, synthetic construct; identical to SEQ ID NO: 77520
  source 1..42: mol_type = other DNA

SEQ ID NO: 78848 - DNA, 90 bp, synthetic construct; identical to SEQ ID NO: 77521
  source 1..90: mol_type = other DNA

SEQ ID NO: 78849 - DNA, 39 bp, synthetic construct; identical to SEQ ID NO: 77522
  source 1..39: mol_type = other DNA

SEQ ID NO: 78850 - DNA, 87 bp, synthetic construct; identical to SEQ ID NO: 77523
  source 1..87: mol_type = other DNA

SEQ ID NO: 78851 - DNA, 96 bp, synthetic construct; identical to SEQ ID NO: 77525
  source 1..96: mol_type = other DNA

SEQ ID NO: 78852 - DNA, 99 bp, synthetic construct; identical to SEQ ID NO: 77526
  source 1..99: mol_type = other DNA

SEQ ID NO: 78853 - DNA, 102 bp, synthetic construct; identical to SEQ ID NO: 77527
  source 1..102: mol_type = other DNA

SEQ ID NO: 78854 - DNA, 93 bp, synthetic construct; identical to SEQ ID NO: 77528
  source 1..93: mol_type = other DNA

SEQ ID NO: 78855 - DNA, 4608 bp, synthetic construct; identical to SEQ ID NO: 77533
  source 1..4608: mol_type = other DNA

SEQ ID NO: 78856 - DNA, 765 bp, synthetic construct; identical to SEQ ID NO: 77534
  source 1..765: mol_type = other DNA

SEQ ID NO: 78857 - DNA, 24 bp, synthetic construct
  source 1..24: mol_type = other DNA
atggaagctattcctactatacca

SEQ ID NO: 78858 - DNA, 66 bp, synthetic construct; identical to SEQ ID NO: 77537
  source 1..66: mol_type = other DNA

SEQ ID NO: 78859 - DNA, 48 bp, synthetic construct; identical to SEQ ID NO: 77538
  source 1..48: mol_type = other DNA

SEQ ID NO: 78860 - DNA, 354 bp, synthetic construct; identical to SEQ ID NO: 77539
  source 1..354: mol_type = other DNA

SEQ ID NO: 78861 - DNA, 33 bp, synthetic construct; identical to SEQ ID NO: 77009
  source 1..33: mol_type = other DNA

SEQ ID NO: 78862 - DNA, 54 bp, synthetic construct; identical to SEQ ID NO: 77541
  source 1..54: mol_type = other DNA

SEQ ID NO: 78863 - DNA, 210 bp, synthetic construct; identical to SEQ ID NO: 77546
  source 1..210: mol_type = other DNA

SEQ ID NO: 78864 - DNA, 33 bp, synthetic construct; identical to SEQ ID NO: 77549
  source 1..33: mol_type = other DNA

SEQ ID NO: 78865 - DNA, 57 bp, synthetic construct; identical to SEQ ID NO: 77550
  source 1..57: mol_type = other DNA

SEQ ID NO: 78866 - DNA, 372 bp, synthetic construct; identical to SEQ ID NO: 77551
  source 1..372: mol_type = other DNA

SEQ ID NO: 78867 - DNA, 2829 bp, synthetic construct; identical to SEQ ID NO: 77552
  source 1..2829: mol_type = other DNA

SEQ ID NO: 78868 - DNA, 33 bp, synthetic construct; identical to SEQ ID NO: 77553
  source 1..33: mol_type = other DNA

SEQ ID NO: 78869 - DNA, 351 bp, synthetic construct; identical to SEQ ID NO: 77554
  source 1..351: mol_type = other DNA

SEQ ID NO: 78870 - DNA, 33 bp, synthetic construct; identical to SEQ ID NO: 77555
  source 1..33: mol_type = other DNA

SEQ ID NO: 78871 - DNA, 54 bp, synthetic construct; identical to SEQ ID NO: 77556
  source 1..54: mol_type = other DNA

SEQ ID NO: 78872 - DNA, 240 bp, synthetic construct; identical to SEQ ID NO: 77557
  source 1..240: mol_type = other DNA

SEQ ID NO: 78873 - DNA, 57 bp, synthetic construct; identical to SEQ ID NO: 77558
  source 1..57: mol_type = other DNA

SEQ ID NO: 78874 - DNA, 33 bp, synthetic construct; identical to SEQ ID NO: 77559
  source 1..33: mol_type = other DNA

SEQ ID NO: 78875 - DNA, 45 bp, synthetic construct; identical to SEQ ID NO: 77029
  source 1..45: mol_type = other DNA

SEQ ID NO: 78876 - DNA, 33 bp, synthetic construct; identical to SEQ ID NO: 77561
  source 1..33: mol_type = other DNA

SEQ ID NO: 78877 - DNA, 63 bp, synthetic construct; identical to SEQ ID NO: 77562
  source 1..63: mol_type = other DNA

SEQ ID NO: 78878 - DNA, 357 bp, synthetic construct; identical to SEQ ID NO: 77563
  source 1..357: mol_type = other DNA

SEQ ID NO: 78879 - DNA, 1098 bp, synthetic construct; identical to SEQ ID NO: 77564
  source 1..1098: mol_type = other DNA

SEQ ID NO: 78880 - DNA, 60 bp, synthetic construct; identical to SEQ ID NO: 77567
  source 1..60: mol_type = other DNA

SEQ ID NO: 78881 - DNA, 36 bp, synthetic construct; identical to SEQ ID NO: 77569
  source 1..36: mol_type = other DNA

SEQ ID NO: 78882 - DNA, 39 bp, synthetic construct; identical to SEQ ID NO: 77570
  source 1..39: mol_type = other DNA

SEQ ID NO: 78883 - DNA, 39 bp, synthetic construct; identical to SEQ ID NO: 77571
  source 1..39: mol_type = other DNA

SEQ ID NO: 78884 - DNA, 783 bp, synthetic construct; identical to SEQ ID NO: 77572
  source 1..783: mol_type = other DNA

SEQ ID NO: 78885 - DNA, 849 bp, synthetic construct; identical to SEQ ID NO: 77573
  source 1..849: mol_type = other DNA

SEQ ID NO: 78886 - DNA, 75 bp, synthetic construct; identical to SEQ ID NO: 77574
  source 1..75: mol_type = other DNA

SEQ ID NO: 78887 - DNA, 93 bp, synthetic construct; identical to SEQ ID NO: 77575
  source 1..93: mol_type = other DNA

SEQ ID NO: 78888 - DNA, 99 bp, synthetic construct; identical to SEQ ID NO: 77576
  source 1..99: mol_type = other DNA

SEQ ID NO: 78889 - DNA, 141 bp, synthetic construct; identical to SEQ ID NO: 77577
  source 1..141: mol_type = other DNA

SEQ ID NO: 78890 - DNA, 681 bp, synthetic construct; identical to SEQ ID NO: 77578
  source 1..681: mol_type = other DNA

SEQ ID NO: 78891 - DNA, 60 bp, synthetic construct; identical to SEQ ID NO: 77580
  source 1..60: mol_type = other DNA

SEQ ID NO: 78892 - DNA, 45 bp, synthetic construct; identical to SEQ ID NO: 77050
  source 1..45: mol_type = other DNA

SEQ ID NO: 78893 - DNA, 84 bp, synthetic construct; identical to SEQ ID NO: 77584
  source 1..84: mol_type = other DNA

SEQ ID NO: 78894 - DNA, 324 bp, synthetic construct; identical to SEQ ID NO: 77585
  source 1..324: mol_type = other DNA

SEQ ID NO: 78895 - DNA, 45 bp, synthetic construct; identical to SEQ ID NO: 77586
  source 1..45: mol_type = other DNA

SEQ ID NO: 78896 - DNA, 39 bp, synthetic construct; identical to SEQ ID NO: 77056
  source 1..39: mol_type = other DNA

SEQ ID NO: 78897 - DNA, 33 bp, synthetic construct; identical to SEQ ID NO: 77057
  source 1..33: mol_type = other DNA

SEQ ID NO: 78898 - DNA, 54 bp, synthetic construct; identical to SEQ ID NO: 77589
  source 1..54: mol_type = other DNA

SEQ ID NO: 78899 - DNA, 90 bp, synthetic construct; identical to SEQ ID NO: 77590
  source 1..90: mol_type = other DNA

SEQ ID NO: 78900 - DNA, 33 bp, synthetic construct; identical to SEQ ID NO: 77060
  source 1..33: mol_type = other DNA

SEQ ID NO: 78901 - DNA, 54 bp, synthetic construct; identical to SEQ ID NO: 77592
  source 1..54: mol_type = other DNA

SEQ ID NO: 78902 - DNA, 285 bp, synthetic construct; identical to SEQ ID NO: 77593
  source 1..285: mol_type = other DNA

SEQ ID NO: 78903 - DNA, 174 bp, synthetic construct; identical to SEQ ID NO: 77594
  source 1..174: mol_type = other DNA

SEQ ID NO: 78904 - DNA, 1008 bp, synthetic construct; identical to SEQ ID NO: 77595
  source 1..1008: mol_type = other DNA

SEQ ID NO: 78905 - DNA, 5574 bp, synthetic construct; identical to SEQ ID NO: 77597
  source 1..5574: mol_type = other DNA

SEQ ID NO: 78906 - DNA, 93 bp, synthetic construct; identical to SEQ ID NO: 77602
  source 1..93: mol_type = other DNA

SEQ ID NO: 78907 - DNA, 72 bp, synthetic construct; identical to SEQ ID NO: 77603
  source 1..72: mol_type = other DNA

SEQ ID NO: 78908 - DNA, 108 bp, synthetic construct; identical to SEQ ID NO: 77604
  source 1..108: mol_type = other DNA

SEQ ID NO: 78909 - DNA, 48 bp, synthetic construct; identical to SEQ ID NO: 77605
  source 1..48: mol_type = other DNA

SEQ ID NO: 78910 - DNA, 558 bp, synthetic construct; identical to SEQ ID NO: 77607
  source 1..558: mol_type = other DNA

SEQ ID NO: 78911 - DNA, 69 bp, synthetic construct; identical to SEQ ID NO: 77609
  source 1..69: mol_type = other DNA

SEQ ID NO: 78912 - DNA, 33 bp, synthetic construct; identical to SEQ ID NO: 77079
  source 1..33: mol_type = other DNA

SEQ ID NO: 78913 - DNA, 33 bp, synthetic construct; identical to SEQ ID NO: 77080
  source 1..33: mol_type = other DNA

SEQ ID NO: 78914 - DNA, 318 bp, synthetic construct; identical to SEQ ID NO: 77612
  source 1..318: mol_type = other DNA

SEQ ID NO: 78915 - DNA, 147 bp, synthetic construct; identical to SEQ ID NO: 77613
  source 1..147: mol_type = other DNA

SEQ ID NO: 78916 - DNA, 261 bp, synthetic construct; identical to SEQ ID NO: 77614
  source 1..261: mol_type = other DNA

SEQ ID NO: 78917 - DNA, 225 bp, synthetic construct; identical to SEQ ID NO: 77615
  source 1..225: mol_type = other DNA

SEQ ID NO: 78918 - DNA, 525 bp, synthetic construct; identical to SEQ ID NO: 77616
  source 1..525: mol_type = other DNA

SEQ ID NO: 78919 - DNA, 2691 bp, synthetic construct; identical to SEQ ID NO: 77617
  source 1..2691: mol_type = other DNA

SEQ ID NO: 78920 - DNA, 45 bp, synthetic construct; identical to SEQ ID NO: 77618
  source 1..45: mol_type = other DNA

SEQ ID NO: 78921 - DNA, 78 bp, synthetic construct; identical to SEQ ID NO: 77619
  source 1..78: mol_type = other DNA

SEQ ID NO: 78922 - DNA, 57 bp, synthetic construct; identical to SEQ ID NO: 77620
  source 1..57: mol_type = other DNA

SEQ ID NO: 78923 - DNA, 36 bp, synthetic construct; identical to SEQ ID NO: 77621
  source 1..36: mol_type = other DNA

SEQ ID NO: 78924 - DNA, 42 bp, synthetic construct; identical to SEQ ID NO: 77622
  source 1..42: mol_type = other DNA

SEQ ID NO: 78925 - DNA, 39 bp, synthetic construct; identical to SEQ ID NO: 77623
  source 1..39: mol_type = other DNA

SEQ ID NO: 78926 - DNA, 2979 bp, synthetic construct; identical to SEQ ID NO: 77624
  source 1..2979: mol_type = other DNA

SEQ ID NO: 78927 - DNA, 639 bp, synthetic construct; identical to SEQ ID NO: 77627
  source 1..639: mol_type = other DNA

SEQ ID NO: 78928 - DNA, 66 bp, synthetic construct; identical to SEQ ID NO: 77629
  source 1..66: mol_type = other DNA

SEQ ID NO: 78929 - DNA, 78 bp, synthetic construct; identical to SEQ ID NO: 77631
  source 1..78: mol_type = other DNA

SEQ ID NO: 78930 - DNA, 105 bp, synthetic construct; identical to SEQ ID NO: 77632
  source 1..105: mol_type = other DNA

SEQ ID NO: 78931 - DNA, 78 bp, synthetic construct; identical to SEQ ID NO: 77633
  source 1..78: mol_type = other DNA

SEQ ID NO: 78932 - DNA, 54 bp, synthetic construct; identical to SEQ ID NO: 77103
  source 1..54: mol_type = other DNA

SEQ ID NO: 78933 - DNA, 42 bp, synthetic construct; identical to SEQ ID NO: 77635
  source 1..42: mol_type = other DNA

SEQ ID NO: 78934 - DNA, 36 bp, synthetic construct; identical to SEQ ID NO: 77637
  source 1..36: mol_type = other DNA

SEQ ID NO: 78935 - DNA, 51 bp, synthetic construct; identical to SEQ ID NO: 77638
  source 1..51: mol_type = other DNA

SEQ ID NO: 78936 - DNA, 261 bp, synthetic construct; identical to SEQ ID NO: 77639
  source 1..261: mol_type = other DNA

SEQ ID NO: 78937 - DNA, 699 bp, synthetic construct; identical to SEQ ID NO: 77640
  source 1..699: mol_type = other DNA

SEQ ID NO: 78938 - DNA, 66 bp, synthetic construct; identical to SEQ ID NO: 77641
  source 1..66: mol_type = other DNA

SEQ ID NO: 78939 - DNA, 45 bp, synthetic construct; identical to SEQ ID NO: 77642
  source 1..45: mol_type = other DNA

SEQ ID NO: 78940 - protein, 11 aa, Methanobrevibacter gottschalkii
VAGLGPTAIAG

SEQ ID NO: 78941 - protein, 19 aa, Methanobrevibacter gottschalkii
PLLVSYGASGQTLNEAIAY

SEQ ID NO: 78942 - protein, 11 aa, Methanobrevibacter gottschalkii
SQVGGDYGIAT

SEQ ID NO: 78943 - protein, 21 aa, Methanobrevibacter gottschalkii
PLSTLFAYTPETTNLVPGIAL

SEQ ID NO: 78944 - protein, 12 aa, Methanobrevibacter gottschalkii
GIITAVGGFKLG

SEQ ID NO: 78945 - protein, 28 aa, Methanobrevibacter gottschalkii
NSAPVLGGYEATGLGQNGFGSASSVGLN

SEQ ID NO: 78946 - protein, 14 aa, Methanobrevibacter gottschalkii
TNFGQITNFISINP

SEQ ID NO: 78947 - protein, 15 aa, Methanobrevibacter gottschalkii
VPQPATPTIGAILKL

SEQ ID NO: 78948 - protein, 12 aa, Methanobrevibacter gottschalkii
IYPSAFNSETSV

SEQ ID NO: 78949 - protein, 14 aa, Methanobrevibacter gottschalkii
TMGVETIVRIILGF

SEQ ID NO: 78950 - protein, 1288 aa, Methanobrevibacter gottschalkii; identical to SEQ ID NO: 75637

SEQ ID NO: 78951 - protein, 21 aa, Methanobrevibacter gottschalkii
TTIFNGINSISKHTGTMDFNT

SEQ ID NO: 78952 - protein, 16 aa, Methanobrevibacter gottschalkii
SDIVDIGIQNANFQFI

SEQ ID NO: 78953 - protein, 12 aa, Methanobrevibacter gottschalkii
YDAMRGSILTGD

SEQ ID NO: 78954 - protein, 250 aa, Methanobrevibacter gottschalkii; identical to SEQ ID NO: 75670

SEQ ID NO: 78955 - protein, 213 aa, Methanobrevibacter gottschalkii; identical to SEQ ID NO: 75679

SEQ ID NO: 78956 - protein, 1193 aa, Methanobrevibacter gottschalkii; identical to SEQ ID NO: 75681

SEQ ID NO: 78957 - protein, 16 aa, Methanobrevibacter gottschalkii
NALLVVAPDFAKAQNL

SEQ ID NO: 78958 - protein, 12 aa, Methanobrevibacter gottschalkii
NPLMGGEIISPD

SEQ ID NO: 78959 - protein, 27 aa, Methanobrevibacter gottschalkii
LRDYFIGSIRNSMGNDYVNVIAPFLNY

SEQ ID NO: 78960 - protein, 11 aa, Methanobrevibacter gottschalkii
VSGLGADALAG

SEQ ID NO: 78961 - protein, 17 aa, Methanobrevibacter gottschalkii
ILNAMGAGQTIGYATDY

SEQ ID NO: 78962 - protein, 12 aa, Methanobrevibacter gottschalkii
TFVGSTDSVAVY

SEQ ID NO: 78963 - protein, 23 aa, Methanobrevibacter gottschalkii
GDISSVFASSGSSVRIAAELTGF

SEQ ID NO: 78964 - protein, 515 aa, Methanobrevibacter gottschalkii; identical to SEQ ID NO: 75754

SEQ ID NO: 78965 - protein, 220 aa, Methanobrevibacter gottschalkii; identical to SEQ ID NO: 75763

SEQ ID NO: 78966 - protein, 12 aa, Methanobrevibacter gottschalkii
KLFNPSTITTPD

SEQ ID NO: 78967 - protein, 109 aa, Methanobrevibacter gottschalkii; identical to SEQ ID NO: 75778

SEQ ID NO: 78968 - protein, 20 aa, Methanobrevibacter gottschalkii
LGYGLRNIMANHVVAITNKQ

SEQ ID NO: 78969 - protein, 53 aa, Methanobrevibacter gottschalkii; identical to SEQ ID NO: 75780

SEQ ID NO: 78970 - protein, 25 aa, Methanobrevibacter gottschalkii
AIEDKIIKVAKKMPSGYNMYEPIDW

SEQ ID NO: 78971 - protein, 26 aa, Methanobrevibacter gottschalkii
STVLYYNDMLEYETGLPGVDYGRTEG

SEQ ID NO: 78972 - protein, 29 aa, Methanobrevibacter gottschalkii
SHSIYGGGGPGTFHGNHVVTRHAKGTAIP

SEQ ID NO: 78973 - protein, 45 aa, Methanobrevibacter gottschalkii; identical to SEQ ID NO: 75784

SEQ ID NO: 78974 - protein, 290 aa, Methanobrevibacter gottschalkii; identical to SEQ ID NO: 75785

SEQ ID NO: 78975 - protein, 20 aa, Methanobrevibacter gottschalkii
YYGGNPTYLWKVFIGEPSIT

SEQ ID NO: 78976 - protein, 12 aa, Methanobrevibacter gottschalkii
YINSTAIHSIYQ

SEQ ID NO: 78977 - protein, 31 aa, Methanobrevibacter gottschalkii; identical to SEQ ID NO: 75794

SEQ ID NO: 78978 - protein, 24 aa, Methanobrevibacter gottschalkii
TLPGSSIGLAELFNPDWSLLTHFE

SEQ ID NO: 78979 - protein, 37 aa, Methanobrevibacter gottschalkii; identical to SEQ ID NO: 75796

SEQ ID NO: 78980 - protein, 12 aa, Methanobrevibacter gottschalkii
KLPSVTGSCSHP

SEQ ID NO: 78981 - protein, 42 aa, Methanobrevibacter gottschalkii; identical to SEQ ID NO: 70549

SEQ ID NO: 78982 - protein, 22 aa, Methanobrevibacter gottschalkii
GKGDVIYETGILGIVVTTDSWH

SEQ ID NO: 78983 - protein, 11 aa, Methanobrevibacter gottschalkii
VASLGEAAISG

SEQ ID NO: 78984 - protein, 19 aa, Methanobrevibacter gottschalkii
LIGILFGQIEVDVWQNADK

SEQ ID NO: 78985 - protein, 11 aa, Methanobrevibacter gottschalkii
STFGTMAIAAN

SEQ ID NO: 78986 - protein, 17 aa, Methanobrevibacter gottschalkii
LNIYNLSAKTAAMTSEM

SEQ ID NO: 78987 - protein, 11 aa, Methanobrevibacter gottschalkii
FPTNMDYLTSP

SEQ ID NO: 78988 - protein, 20 aa, Methanobrevibacter gottschalkii
FIGFTYDNLVQASVQVGFPW

SEQ ID NO: 78989 - protein, 12 aa, Methanobrevibacter gottschalkii
AFNFSHVFYIES

SEQ ID NO: 78990 - protein, 23 aa, Methanobrevibacter gottschalkii
MPGVLESKTLMNFLQIKEMLYHI

SEQ ID NO: 78991 - protein, 12 aa, Methanobrevibacter gottschalkii
PKILNPDATSYT

SEQ ID NO: 78992 - protein, 20 aa, Methanobrevibacter gottschalkii
FEGQVATVANFIKMYFDSNF

SEQ ID NO: 78993 - protein, 18 aa, Methanobrevibacter gottschalkii
YTITMCILKNKLLYYKYE

SEQ ID NO: 78994 - protein, 13 aa, Methanobrevibacter gottschalkii
LKYEYKILFTFNP

SEQ ID NO: 78995 - protein, 11 aa, Methanobrevibacter gottschalkii
VAGLGADALAA

SEQ ID NO: 78996 - protein, 19 aa, Methanobrevibacter gottschalkii
VPILQFMGAGDTIQYAMDY

SEQ ID NO: 78997 - protein, 12 aa, Methanobrevibacter gottschalkii
VLAAGTTAVAVY

SEQ ID NO: 78998 - protein, 21 aa, Methanobrevibacter gottschalkii
PIATIFSYTAASASLSPQIAT

SEQ ID NO: 78999 - protein, 23 aa, Methanobrevibacter gottschalkii
TGMIPADAITNYQQLIAGNMTLP

SEQ ID NO: 79000 - protein, 11 aa, Methanobrevibacter gottschalkii
LQIIFRTTAIG

SEQ ID NO: 79001 - protein, 13 aa, Methanobrevibacter gottschalkii
DTAINQSSFVSDP

SEQ ID NO: 79002 - protein, 15 aa, Methanobrevibacter gottschalkii
PSKVFIPLFMKIFGG

SEQ ID NO: 79003 - protein, 60 aa, Methanobrevibacter gottschalkii; identical to SEQ ID NO: 75915

SEQ ID NO: 79004 - protein, 31 aa, Methanobrevibacter gottschalkii; identical to SEQ ID NO: 75918

SEQ ID NO: 79005 - protein, 24 aa, Methanobrevibacter gottschalkii
LTLPGASIGYTQIFTPDWNALTNL

SEQ ID NO: 79006 - protein, 36 aa, Methanobrevibacter gottschalkii; identical to SEQ ID NO: 75920

SEQ ID NO: 79007 - protein, 31 aa, Methanobrevibacter gottschalkii; identical to SEQ ID NO: 75924

SEQ ID NO: 79008 - protein, 24 aa, Methanobrevibacter gottschalkii
LTGSVNITDIVTAVHNGLVNAKSP

SEQ ID NO: 79009 - protein, 14 aa, Methanobrevibacter gottschalkii
LIIHGISSFVGGIL

SEQ ID NO: 79010 - protein, 30 aa, Methanobrevibacter gottschalkii; identical to SEQ ID NO: 75927

SEQ ID NO: 79011 - protein, 16 aa, Methanobrevibacter gottschalkii
LMGPIASLNQVTGLHI

SEQ ID NO: 79012 - protein, 11 aa, Methanobrevibacter gottschalkii
KIIPVYNINKL

SEQ ID NO: 79013 - protein, 11 aa, Methanobrevibacter gottschalkii
VAGLGADPLAA

SEQ ID NO: 79014 - protein, 15 aa, Methanobrevibacter gottschalkii
LIVMGASAVLKYAMD

SEQ ID NO: 79015 - protein, 11 aa, Methanobrevibacter gottschalkii
TIVSGPVAVAV

SEQ ID NO: 79016 - protein, 21 aa, Methanobrevibacter gottschalkii
QIAFIFSYSESSAQLEPLIAS

SEQ ID NO: 79017 - protein, 25 aa, Methanobrevibacter gottschalkii
AYNEEETVAKVVNVVKKVSFVDEII

SEQ ID NO: 79018 - protein, 31 aa, Methanobrevibacter gottschalkii; identical to SEQ ID NO: 75981

SEQ ID NO: 79019 - protein, 33 aa, Methanobrevibacter gottschalkii; identical to SEQ ID NO: 75982

SEQ ID NO: 79020 - protein, 47 aa, Methanobrevibacter gottschalkii; identical to SEQ ID NO: 75983

SEQ ID NO: 79021 - protein, 227 aa, Methanobrevibacter gottschalkii; identical to SEQ ID NO: 75984

SEQ ID NO: 79022 - protein, 15 aa, Methanobrevibacter gottschalkii
KTTLFGPIGGHLGFF

SEQ ID NO: 79023 - protein, 30 aa, Methanobrevibacter gottschalkii; identical to SEQ ID NO: 75996

SEQ ID NO: 79024 - protein, 11 aa, Methanobrevibacter gottschalkii
FLGAKGVTWTT

SEQ ID NO: 79025 - protein, 31 aa, Methanobrevibacter gottschalkii; identical to SEQ ID NO: 76008

SEQ ID NO: 79026 - protein, 24 aa, Methanobrevibacter gottschalkii
TLPGSVVGINALIHPNWNGLLNVN

SEQ ID NO: 79027 - protein, 36 aa, Methanobrevibacter gottschalkii; identical to SEQ ID NO: 76010

SEQ ID NO: 79028 - protein, 13 aa, Methanobrevibacter gottschalkii
TDSFLMDPISAIT

SEQ ID NO: 79029 - protein, 26 aa, Methanobrevibacter gottschalkii
GMLSEWVATFLGDGLLSSFVCDGIIG

SEQ ID NO: 79030 - protein, 35 aa, Methanobrevibacter gottschalkii; identical to SEQ ID NO: 76038

SEQ ID NO: 79031 - protein, 26 aa, Methanobrevibacter gottschalkii
FGTLAGMEEDDEEGITNLIHDTFTPL

SEQ ID NO: 79032 - protein, 12 aa, Methanobrevibacter gottschalkii
NMPIPFGTSGHM

SEQ ID NO: 79033 - DNA, 33 bp, Methanobrevibacter gottschalkii; identical to SEQ ID NO: 76065
  source 1..33: mol_type = genomic DNA

SEQ ID NO: 79034 - DNA, 57 bp, Methanobrevibacter gottschalkii; identical to SEQ ID NO: 76066
  source 1..57: mol_type = genomic DNA

SEQ ID NO: 79035 - DNA, 33 bp, Methanobrevibacter gottschalkii; identical to SEQ ID NO: 76067
  source 1..33: mol_type = genomic DNA

SEQ ID NO: 79036 - DNA, 63 bp, Methanobrevibacter gottschalkii; identical to SEQ ID NO: 76068
  source 1..63: mol_type = genomic DNA

SEQ ID NO: 79037 - DNA, 36 bp, Methanobrevibacter gottschalkii; identical to SEQ ID NO: 76072
  source 1..36: mol_type = genomic DNA

SEQ ID NO: 79038 - DNA, 84 bp, Methanobrevibacter gottschalkii; identical to SEQ ID NO: 76088
  source 1..84: mol_type = genomic DNA

SEQ ID NO: 79039 - DNA, 42 bp, Methanobrevibacter gottschalkii; identical to SEQ ID NO: 76097
  source 1..42: mol_type = genomic DNA

SEQ ID NO: 79040 - DNA, 45 bp, Methanobrevibacter gottschalkii; identical to SEQ ID NO: 76111
  source 1..45: mol_type = genomic DNA

SEQ ID NO: 79041 - DNA, 36 bp, Methanobrevibacter gottschalkii; identical to SEQ ID NO: 76116
  source 1..36: mol_type = genomic DNA

SEQ ID NO: 79042 - DNA, 42 bp, Methanobrevibacter gottschalkii; identical to SEQ ID NO: 76117
  source 1..42: mol_type = genomic DNA

SEQ ID NO: 79043 - DNA, 3864 bp, Methanobrevibacter gottschalkii; identical to SEQ ID NO: 76169
  source 1..3864: mol_type = genomic DNA

SEQ ID NO: 79044 - DNA, 63 bp, Methanobrevibacter gottschalkii; identical to SEQ ID NO: 76187
  source 1..63: mol_type = genomic DNA

SEQ ID NO: 79045 - DNA, 48 bp, Methanobrevibacter gottschalkii; identical to SEQ ID NO: 76188
  source 1..48: mol_type = genomic DNA

SEQ ID NO: 79046 - DNA, 36 bp, Methanobrevibacter gottschalkii; identical to SEQ ID NO: 76189
  source 1..36: mol_type = genomic DNA

SEQ ID NO: 79047 - DNA, 750 bp, Methanobrevibacter gottschalkii; identical to SEQ ID NO: 76202
  source 1..750: mol_type = genomic DNA

SEQ ID NO: 79048 - DNA, 639 bp, Methanobrevibacter gottschalkii; identical to SEQ ID NO: 76211
  source 1..639: mol_type = genomic DNA

SEQ ID NO: 79049 - DNA, 3579 bp, Methanobrevibacter gottschalkii; identical to SEQ ID NO: 76213
  source 1..3579: mol_type = genomic DNA

SEQ ID NO: 79050 - DNA, 48 bp, Methanobrevibacter gottschalkii; identical to SEQ ID NO: 76264
  source 1..48: mol_type = genomic DNA

SEQ ID NO: 79051 - DNA, 36 bp, Methanobrevibacter gottschalkii; identical to SEQ ID NO: 76265
  source 1..36: mol_type = genomic DNA

SEQ ID NO: 79052 - DNA, 81 bp, Methanobrevibacter gottschalkii; identical to SEQ ID NO: 76266
  source 1..81: mol_type = genomic DNA

SEQ ID NO: 79053 - DNA, 33 bp, Methanobrevibacter gottschalkii; identical to SEQ ID NO: 76276
  source 1..33: mol_type = genomic DNA

SEQ ID NO: 79054 - DNA, 51 bp, Methanobrevibacter gottschalkii; identical to SEQ ID NO: 76277
  source 1..51: mol_type = genomic DNA

SEQ ID NO: 79055 - DNA, 36 bp, Methanobrevibacter gottschalkii; identical to SEQ ID NO: 76278
  source 1..36: mol_type = genomic DNA

SEQ ID NO: 79056 - DNA, 69 bp, Methanobrevibacter gottschalkii; identical to SEQ ID NO: 76279
  source 1..69: mol_type = genomic DNA

SEQ ID NO: 79057 - DNA, 1545 bp, Methanobrevibacter gottschalkii; identical to SEQ ID NO: 76286
  source 1..1545: mol_type = genomic DNA

SEQ ID NO: 79058 - DNA, 660 bp, Methanobrevibacter gottschalkii; identical to SEQ ID NO: 76295
  source 1..660: mol_type = genomic DNA

SEQ ID NO: 79059 - DNA, 36 bp, Methanobrevibacter gottschalkii; identical to SEQ ID NO: 76297
  source 1..36: mol_type = genomic DNA

SEQ ID NO: 79060 - DNA, 327 bp, Methanobrevibacter gottschalkii; identical to SEQ ID NO: 76310
  source 1..327: mol_type = genomic DNA

SEQ ID NO: 79061 - DNA, 60 bp, Methanobrevibacter gottschalkii; identical to SEQ ID NO: 76311
  source 1..60: mol_type = genomic DNA

SEQ ID NO: 79062 - DNA, 159 bp, Methanobrevibacter gottschalkii; identical to SEQ ID NO: 76312
  source 1..159: mol_type = genomic DNA

SEQ ID NO: 79063 - DNA, 75 bp, Methanobrevibacter gottschalkii; identical to SEQ ID NO: 76313
  source 1..75: mol_type = genomic DNA

SEQ ID NO: 79064 - DNA, 78 bp, Methanobrevibacter gottschalkii; identical to SEQ ID NO: 76314
  source 1..78: mol_type = genomic DNA

SEQ ID NO: 79065 - DNA, 87 bp, Methanobrevibacter gottschalkii; identical to SEQ ID NO: 76315
  source 1..87: mol_type = genomic DNA

SEQ ID NO: 79066 - DNA, 135 bp, Methanobrevibacter gottschalkii; identical to SEQ ID NO: 76316
  source 1..135: mol_type = genomic DNA

SEQ ID NO: 79067 - DNA, 870 bp, Methanobrevibacter gottschalkii; identical to SEQ ID NO: 76317
  source 1..870: mol_type = genomic DNA

SEQ ID NO: 79068 - DNA, 60 bp, Methanobrevibacter gottschalkii; identical to SEQ ID NO: 76324
  source 1..60: mol_type = genomic DNA

SEQ ID NO: 79069 - DNA, 36 bp, Methanobrevibacter gottschalkii; identical to SEQ ID NO: 76325
  source 1..36: mol_type = genomic DNA

SEQ ID NO: 79070 - DNA, 93 bp, Methanobrevibacter gottschalkii; identical to SEQ ID NO: 76326
  source 1..93: mol_type = genomic DNA

SEQ ID NO: 79071 - DNA, 72 bp, Methanobrevibacter gottschalkii; identical to SEQ ID NO: 76327
  source 1..72: mol_type = genomic DNA

SEQ ID NO: 79072 - DNA, 111 bp, Methanobrevibacter gottschalkii; identical to SEQ ID NO: 76328
  source 1..111: mol_type = genomic DNA

SEQ ID NO: 79073 - DNA, 36 bp, Methanobrevibacter gottschalkii; identical to SEQ ID NO: 30885
  source 1..36: mol_type = genomic DNA

SEQ ID NO: 79074 - DNA, 126 bp, Methanobrevibacter gottschalkii; identical to SEQ ID NO: 76342
  source 1..126: mol_type = genomic DNA

SEQ ID NO: 79075 - DNA, 66 bp, Methanobrevibacter gottschalkii; identical to SEQ ID NO: 76343
  source 1..66: mol_type = genomic DNA

SEQ ID NO: 79076 - DNA, 33 bp, Methanobrevibacter gottschalkii; identical to SEQ ID NO: 76363
  source 1..33: mol_type = genomic DNA

SEQ ID NO: 79077 - DNA, 57 bp, Methanobrevibacter gottschalkii; identical to SEQ ID NO: 76364
  source 1..57: mol_type = genomic DNA

SEQ ID NO: 79078 - DNA, 33 bp, Methanobrevibacter gottschalkii; identical to SEQ ID NO: 76365
  source 1..33: mol_type = genomic DNA

SEQ ID NO: 79079 - DNA, 51 bp, Methanobrevibacter gottschalkii; identical to SEQ ID NO: 76366
  source 1..51: mol_type = genomic DNA

SEQ ID NO: 79080 - DNA, 33 bp, Methanobrevibacter gottschalkii; identical to SEQ ID NO: 76377
  source 1..33: mol_type = genomic DNA

SEQ ID NO: 79081 - DNA, 60 bp, Methanobrevibacter gottschalkii; identical to SEQ ID NO: 76378
  source 1..60: mol_type = genomic DNA

SEQ ID NO: 79082 - DNA, 36 bp, Methanobrevibacter gottschalkii; identical to SEQ ID NO: 76379
  source 1..36: mol_type = genomic DNA

SEQ ID NO: 79083 - DNA, 69 bp, Methanobrevibacter gottschalkii; identical to SEQ ID NO: 76383
  source 1..69: mol_type = genomic DNA

SEQ ID NO: 79084 - DNA, 36 bp, Methanobrevibacter gottschalkii; identical to SEQ ID NO: 76389
  source 1..36: mol_type = genomic DNA

SEQ ID NO: 79085 - DNA, 60 bp, Methanobrevibacter gottschalkii; identical to SEQ ID NO: 76405
  source 1..60: mol_type = genomic DNA

SEQ ID NO: 79086 - DNA, 54 bp, Methanobrevibacter gottschalkii; identical to SEQ ID NO: 76406
  source 1..54: mol_type = genomic DNA

SEQ ID NO: 79087 - DNA, 39 bp, Methanobrevibacter gottschalkii; identical to SEQ ID NO: 76407
  source 1..39: mol_type = genomic DNA

SEQ ID NO: 79088 - DNA, 33 bp, Methanobrevibacter gottschalkii; identical to SEQ ID NO: 76413
  source 1..33: mol_type = genomic DNA

SEQ ID NO: 79089 - DNA, 57 bp, Methanobrevibacter gottschalkii; identical to SEQ ID NO: 76414
  source 1..57: mol_type = genomic DNA

SEQ ID NO: 79090 - DNA, 36 bp, Methanobrevibacter gottschalkii; identical to SEQ ID NO: 76415
  source 1..36: mol_type = genomic DNA

SEQ ID NO: 79091 - DNA, 63 bp, Methanobrevibacter gottschalkii; identical to SEQ ID NO: 76416
  source 1..63: mol_type = genomic DNA

SEQ ID NO: 79092 - DNA, 69 bp, Methanobrevibacter gottschalkii; identical to SEQ ID NO: 76420
  source 1..69: mol_type = genomic DNA

SEQ ID NO: 79093 - DNA, 33 bp, Methanobrevibacter gottschalkii; identical to SEQ ID NO: 76421
  source 1..33: mol_type = genomic DNA

SEQ ID NO: 79094 - DNA, 39 bp, Methanobrevibacter gottschalkii; identical to SEQ ID NO: 76443
  source 1..39: mol_type = genomic DNA

SEQ ID NO: 79095 - DNA, 45 bp, Methanobrevibacter gottschalkii; identical to SEQ ID NO: 76445
  source 1..45: mol_type = genomic DNA

SEQ ID NO: 79096 - DNA, 180 bp, Methanobrevibacter gottschalkii; identical to SEQ ID NO: 76447
  source 1..180: mol_type = genomic DNA

SEQ ID NO: 79097 - DNA, 93 bp, Methanobrevibacter gottschalkii; identical to SEQ ID NO: 76450
  source 1..93: mol_type = genomic DNA

SEQ ID NO: 79098 - DNA, 72 bp, Methanobrevibacter gottschalkii; identical to SEQ ID NO: 76451
  source 1..72: mol_type = genomic DNA

SEQ ID NO: 79099 - DNA, 108 bp, Methanobrevibacter gottschalkii; identical to SEQ ID NO: 76452
  source 1..108: mol_type = genomic DNA

SEQ ID NO: 79100 - DNA, 93 bp, Methanobrevibacter gottschalkii; identical to SEQ ID NO: 76456
  source 1..93: mol_type = genomic DNA

SEQ ID NO: 79101 - DNA, 72 bp, Methanobrevibacter gottschalkii; identical to SEQ ID NO: 76457
  source 1..72: mol_type = genomic DNA

SEQ ID NO: 79102 - DNA, 42 bp, Methanobrevibacter gottschalkii; identical to SEQ ID NO: 76458
  source 1..42: mol_type = genomic DNA

SEQ ID NO: 79103 - DNA, 90 bp, Methanobrevibacter gottschalkii; identical to SEQ ID NO: 76459
  source 1..90: mol_type = genomic DNA

SEQ ID NO: 79104 - DNA, 48 bp, Methanobrevibacter gottschalkii; identical to SEQ ID NO: 76476
  source 1..48: mol_type = genomic DNA

SEQ ID NO: 79105 - DNA, 33 bp, Methanobrevibacter gottschalkii; identical to SEQ ID NO: 76478
  source 1..33: mol_type = genomic DNA

SEQ ID NO: 79106 - DNA, 33 bp, Methanobrevibacter gottschalkii; identical to SEQ ID NO: 76497
  source 1..33: mol_type = genomic DNA

SEQ ID NO: 79107 - DNA, 45 bp, Methanobrevibacter gottschalkii; identical to SEQ ID NO: 76498
  source 1..45: mol_type = genomic DNA

SEQ ID NO: 79108 - DNA, 33 bp, Methanobrevibacter gottschalkii; identical to SEQ ID NO: 76499
  source 1..33: mol_type = genomic DNA

SEQ ID NO: 79109 - DNA, 63 bp, Methanobrevibacter gottschalkii; identical to SEQ ID NO: 76500
  source 1..63: mol_type = genomic DNA

SEQ ID NO: 79110 - DNA, 75 bp, Methanobrevibacter gottschalkii; identical to SEQ ID NO: 76512
  source 1..75: mol_type = genomic DNA

SEQ ID NO: 79111 - DNA, 93 bp, Methanobrevibacter gottschalkii; identical to SEQ ID NO: 76513
  source 1..93: mol_type = genomic DNA

SEQ ID NO: 79112 - DNA, 99 bp, Methanobrevibacter gottschalkii; identical to SEQ ID NO: 76514
  source 1..99: mol_type = genomic DNA

SEQ ID NO: 79113 - DNA, 141 bp, Methanobrevibacter gottschalkii; identical to SEQ ID NO: 76515
  source 1..141: mol_type = genomic DNA

SEQ ID NO: 79114 - DNA, 681 bp, Methanobrevibacter gottschalkii; identical to SEQ ID NO: 76516
  source 1..681: mol_type = genomic DNA

SEQ ID NO: 79115 - DNA, 45 bp, Methanobrevibacter gottschalkii; identical to SEQ ID NO: 76519
  source 1..45: mol_type = genomic DNA

SEQ ID NO: 79116 - DNA, 90 bp, Methanobrevibacter gottschalkii; identical to SEQ ID NO: 76528
  source 1..90: mol_type = genomic DNA

SEQ ID NO: 79117 - DNA, 33 bp, Methanobrevibacter gottschalkii; identical to SEQ ID NO: 76529
  source 1..33: mol_type = genomic DNA

SEQ ID NO: 79118 - DNA, 93 bp, Methanobrevibacter gottschalkii; identical to SEQ ID NO: 76540
  source 1..93: mol_type = genomic DNA

SEQ ID NO: 79119 - DNA, 72 bp, Methanobrevibacter gottschalkii; identical to SEQ ID NO: 76541
  source 1..72: mol_type = genomic DNA

SEQ ID NO: 79120 - DNA, 108 bp, Methanobrevibacter gottschalkii; identical to SEQ ID NO: 76542
  source 1..108: mol_type = genomic DNA

SEQ ID NO: 79121 - DNA, 39 bp, Methanobrevibacter gottschalkii; identical to SEQ ID NO: 76561
  source 1..39: mol_type = genomic DNA

SEQ ID NO: 79122 - DNA, 78 bp, Methanobrevibacter gottschalkii; identical to SEQ ID NO: 76569
  source 1..78: mol_type = genomic DNA

SEQ ID NO: 79123 - DNA, 105 bp, Methanobrevibacter gottschalkii; identical to SEQ ID NO: 76570
  source 1..105: mol_type = genomic DNA

SEQ ID NO: 79124 - DNA, 78 bp, Methanobrevibacter gottschalkii; identical to SEQ ID NO: 76571
  source 1..78: mol_type = genomic DNA

SEQ ID NO: 79125 - DNA, 36 bp, Methanobrevibacter gottschalkii; identical to SEQ ID NO: 76575
  source 1..36: mol_type = genomic DNA

SEQ ID NO: 79126 - DNA, 33 bp, synthetic construct; identical to SEQ ID NO: 76597
  source 1..33: mol_type = other DNA

SEQ ID NO: 79127 - DNA, 57 bp, synthetic construct; identical to SEQ ID NO: 76598
  source 1..57: mol_type = other DNA

SEQ ID NO: 79128 - DNA, 33 bp, synthetic construct; identical to SEQ ID NO: 76599
  source 1..33: mol_type = other DNA

SEQ ID NO: 79129 - DNA, 63 bp, synthetic construct; identical to SEQ ID NO: 76600
  source 1..63: mol_type = other DNA

SEQ ID NO: 79130 - DNA, 36 bp, synthetic construct; identical to SEQ ID NO: 76604
  source 1..36: mol_type = other DNA

SEQ ID NO: 79131 - DNA, 84 bp, synthetic construct; identical to SEQ ID NO: 76620
  source 1..84: mol_type = other DNA

SEQ ID NO: 79132 - DNA, 42 bp, synthetic construct; identical to SEQ ID NO: 76629
  source 1..42: mol_type = other DNA

SEQ ID NO: 79133 - DNA, 45 bp, synthetic construct; identical to SEQ ID NO: 76643
  source 1..45: mol_type = other DNA

SEQ ID NO: 79134 - DNA, 36 bp, synthetic construct; identical to SEQ ID NO: 76648
  source 1..36: mol_type = other DNA

SEQ ID NO: 79135 - DNA, 42 bp, synthetic construct; identical to SEQ ID NO: 76649
  source 1..42: mol_type = other DNA

SEQ ID NO: 79136 - DNA, 3864 bp, synthetic construct; identical to SEQ ID NO: 76700
  source 1..3864: mol_type = other DNA

SEQ ID NO: 79137 - DNA, 63 bp, synthetic construct; identical to SEQ ID NO: 76718
  source 1..63: mol_type = other DNA

SEQ ID NO: 79138 - DNA, 48 bp, synthetic construct; identical to SEQ ID NO: 76719
  source 1..48: mol_type = other DNA

SEQ ID NO: 79139 - DNA, 36 bp, synthetic construct; identical to SEQ ID NO: 76720
  source 1..36: mol_type = other DNA

SEQ ID NO: 79140 - DNA, 750 bp, synthetic construct; identical to SEQ ID NO: 76733
  source 1..750: mol_type = other DNA

SEQ ID NO: 79141 - DNA, 639 bp, synthetic construct; identical to SEQ ID NO: 76742
  source 1..639: mol_type = other DNA

SEQ ID NO: 79142 - DNA, 3579 bp, synthetic construct; identical to SEQ ID NO: 76744
  source 1..3579: mol_type = other DNA

SEQ ID NO: 79143 - DNA, 48 bp, synthetic construct; identical to SEQ ID NO: 76795
  source 1..48: mol_type = other DNA

SEQ ID NO: 79144 - DNA, 36 bp, synthetic construct; identical to SEQ ID NO: 76796
  source 1..36: mol_type = other DNA

SEQ ID NO: 79145 - DNA, 81 bp, synthetic construct; identical to SEQ ID NO: 76797
  source 1..81: mol_type = other DNA

SEQ ID NO: 79146 - DNA, 33 bp, synthetic construct; identical to SEQ ID NO: 76807
  source 1..33: mol_type = other DNA

SEQ ID NO: 79147 - DNA, 51 bp, synthetic construct; identical to SEQ ID NO: 76808
  source 1..51: mol_type = other DNA

SEQ ID NO: 79148 - DNA, 36 bp, synthetic construct; identical to SEQ ID NO: 76809
  source 1..36: mol_type = other DNA

SEQ ID NO: 79149 - DNA, 69 bp, synthetic construct; identical to SEQ ID NO: 76810
  source 1..69: mol_type = other DNA

SEQ ID NO: 79150 - DNA, 1545 bp, synthetic construct; identical to SEQ ID NO: 76817
  source 1..1545: mol_type = other DNA

SEQ ID NO: 79151 - DNA, 660 bp, synthetic construct; identical to SEQ ID NO: 76826
  source 1..660: mol_type = other DNA

SEQ ID NO: 79152 - DNA, 36 bp, synthetic construct; identical to SEQ ID NO: 76828
  source 1..36: mol_type = other DNA

SEQ ID NO: 79153 - DNA, 327 bp, synthetic construct; identical to SEQ ID NO: 76841
  source 1..327: mol_type = other DNA

SEQ ID NO: 79154 - DNA, 60 bp, synthetic construct; identical to SEQ ID NO: 76842
  source 1..60: mol_type = other DNA

SEQ ID NO: 79155 - DNA, 159 bp, synthetic construct; identical to SEQ ID NO: 76843
  source 1..159: mol_type = other DNA

SEQ ID NO: 79156 - DNA, 75 bp, synthetic construct; identical to SEQ ID NO: 76844
  source 1..75: mol_type = other DNA

SEQ ID NO: 79157 - DNA, 78 bp, synthetic construct; identical to SEQ ID NO: 76845
  source 1..78: mol_type = other DNA

SEQ ID NO: 79158 - DNA, 87 bp, synthetic construct; identical to SEQ ID NO: 76846
  source 1..87: mol_type = other DNA

SEQ ID NO: 79159 - DNA, 135 bp, synthetic construct; identical to SEQ ID NO: 76847
  source 1..135: mol_type = other DNA

SEQ ID NO: 79160 - DNA, 870 bp, synthetic construct; identical to SEQ ID NO: 76848
  source 1..870: mol_type = other DNA

SEQ ID NO: 79161 - DNA, 60 bp, synthetic construct; identical to SEQ ID NO: 76855
  source 1..60: mol_type = other DNA

SEQ ID NO: 79162 - DNA, 36 bp, synthetic construct; identical to SEQ ID NO: 76856
  source 1..36: mol_type = other DNA

SEQ ID NO: 79163 - DNA, 93 bp, synthetic construct; identical to SEQ ID NO: 76857
  source 1..93: mol_type = other DNA

SEQ ID NO: 79164 - DNA, 72 bp, synthetic construct; identical to SEQ ID NO: 76858
  source 1..72: mol_type = other DNA

SEQ ID NO: 79165 - DNA, 111 bp, synthetic construct; identical to SEQ ID NO: 76859
  source 1..111: mol_type = other DNA

SEQ ID NO: 79166 - DNA, 36 bp, synthetic construct; identical to SEQ ID NO: 76872
  source 1..36: mol_type = other DNA

SEQ ID NO: 79167 - DNA, 126 bp, synthetic construct; identical to SEQ ID NO: 76873
  source 1..126: mol_type = other DNA

SEQ ID NO: 79168 - DNA, 66 bp, synthetic construct; identical to SEQ ID NO: 76874
  source 1..66: mol_type = other DNA

SEQ ID NO: 79169 - DNA, 33 bp, synthetic construct; identical to SEQ ID NO: 76894
  source 1..33: mol_type = other DNA

SEQ ID NO: 79170 - DNA, 57 bp, synthetic construct; identical to SEQ ID NO: 76895
  source 1..57: mol_type = other DNA

SEQ ID NO: 79171 - DNA, 33 bp, synthetic construct; identical to SEQ ID NO: 76896
  source 1..33: mol_type = other DNA

SEQ ID NO: 79172 - DNA, 51 bp, synthetic construct; identical to SEQ ID NO: 76897
  source 1..51: mol_type = other DNA

SEQ ID NO: 79173 - DNA, 33 bp, synthetic construct; identical to SEQ ID NO: 76908
  source 1..33: mol_type = other DNA

SEQ ID NO: 79174 - DNA, 60 bp, synthetic construct; identical to SEQ ID NO: 76909
  source 1..60: mol_type = other DNA

SEQ ID NO: 79175 - DNA, 36 bp, synthetic construct; identical to SEQ ID NO: 76910
  source 1..36: mol_type = other DNA

SEQ ID NO: 79176 - DNA, 69 bp, synthetic construct; identical to SEQ ID NO: 76914
  source 1..69: mol_type = other DNA

SEQ ID NO: 79177 - DNA, 36 bp, synthetic construct; identical to SEQ ID NO: 76920
  source 1..36: mol_type = other DNA

SEQ ID NO: 79178 - DNA, 60 bp, synthetic construct; identical to SEQ ID NO: 76936
  source 1..60: mol_type = other DNA

SEQ ID NO: 79179 - DNA, 54 bp, synthetic construct; identical to SEQ ID NO: 76937
  source 1..54: mol_type = other DNA

SEQ ID NO: 79180 - DNA, 39 bp, synthetic construct; identical to SEQ ID NO: 76938
  source 1..39: mol_type = other DNA

SEQ ID NO: 79181 - DNA, 33 bp, synthetic construct; identical to SEQ ID NO: 76944
  source 1..33: mol_type = other DNA

SEQ ID NO: 79182 - DNA, 57 bp, synthetic construct; identical to SEQ ID NO: 76945
  source 1..57: mol_type = other DNA

SEQ ID NO: 79183 - DNA, 36 bp, synthetic construct; identical to SEQ ID NO: 76946
  source 1..36: mol_type = other DNA

SEQ ID NO: 79184 - DNA, 63 bp, synthetic construct; identical to SEQ ID NO: 76947
  source 1..63: mol_type = other DNA

SEQ ID NO: 79185 - DNA, 69 bp, synthetic construct; identical to SEQ ID NO: 76951
  source 1..69: mol_type = other DNA

SEQ ID NO: 79186 - DNA, 33 bp, synthetic construct; identical to SEQ ID NO: 76952
  source 1..33: mol_type = other DNA

SEQ ID NO: 79187 - DNA, 39 bp, synthetic construct; identical to SEQ ID NO: 76974
  source 1..39: mol_type = other DNA

SEQ ID NO: 79188 - DNA, 45 bp, synthetic construct; identical to SEQ ID NO: 76976
  source 1..45: mol_type = other DNA

SEQ ID NO: 79189 - DNA, 180 bp, synthetic construct; identical to SEQ ID NO: 76978
  source 1..180: mol_type = other DNA

SEQ ID NO: 79190 - DNA, 93 bp, synthetic construct; identical to SEQ ID NO: 76981
  source 1..93: mol_type = other DNA

SEQ ID NO: 79191 - DNA, 72 bp, synthetic construct; identical to SEQ ID NO: 76982
  source 1..72: mol_type = other DNA

SEQ ID NO: 79192 - DNA, 108 bp, synthetic construct; identical to SEQ ID NO: 76983
  source 1..108: mol_type = other DNA

SEQ ID NO: 79193 - DNA, 93 bp, synthetic construct; identical to SEQ ID NO: 76987
  source 1..93: mol_type = other DNA

SEQ ID NO: 79194 - DNA, 72 bp, synthetic construct; identical to SEQ ID NO: 76988
  source 1..72: mol_type = other DNA

SEQ ID NO: 79195 - DNA, 42 bp, synthetic construct; identical to SEQ ID NO: 76989
  source 1..42: mol_type = other DNA

SEQ ID NO: 79196 - DNA, 90 bp, synthetic construct; identical to SEQ ID NO: 76990
  source 1..90: mol_type = other DNA

SEQ ID NO: 79197 - DNA, 48 bp, synthetic construct; identical to SEQ ID NO: 77007
  source 1..48: mol_type = other DNA

SEQ ID NO: 79198 - DNA, 33 bp, synthetic construct; identical to SEQ ID NO: 77009
  source 1..33: mol_type = other DNA

SEQ ID NO: 79199 - DNA, 33 bp, synthetic construct; identical to SEQ ID NO: 77028
  source 1..33: mol_type = other DNA

SEQ ID NO: 79200 - DNA, 45 bp, synthetic construct; identical to SEQ ID NO: 77029
  source 1..45: mol_type = other DNA

SEQ ID NO: 79201 - DNA, 33 bp, synthetic construct; identical to SEQ ID NO: 77030
  source 1..33: mol_type = other DNA

SEQ ID NO: 79202 - DNA, 63 bp, synthetic construct; identical to SEQ ID NO: 77031
  source 1..63: mol_type = other DNA

SEQ ID NO: 79203 - DNA, 75 bp, synthetic construct; identical to SEQ ID NO: 77043
  source 1..75: mol_type = other DNA

SEQ ID NO: 79204 - DNA, 93 bp, synthetic construct; identical to SEQ ID NO: 77044
  source 1..93: mol_type = other DNA

SEQ ID NO: 79205 - DNA, 99 bp, synthetic construct; identical to SEQ ID NO: 77045
  source 1..99: mol_type = other DNA

SEQ ID NO: 79206 - DNA, 141 bp, synthetic construct; identical to SEQ ID NO: 77046
  source 1..141: mol_type = other DNA

SEQ ID NO: 79207 - DNA, 681 bp, synthetic construct; identical to SEQ ID NO: 77047
  source 1..681: mol_type = other DNA

SEQ ID NO: 79208 - DNA, 45 bp, synthetic construct; identical to SEQ ID NO: 77050
  source 1..45: mol_type = other DNA

SEQ ID NO: 79209 - DNA, 90 bp, synthetic construct; identical to SEQ ID NO: 77059
  source 1..90: mol_type = other DNA

SEQ ID NO: 79210 - DNA, 33 bp, synthetic construct; identical to SEQ ID NO: 77060
  source 1..33: mol_type = other DNA

SEQ ID NO: 79211 - DNA, 93 bp, synthetic construct; identical to SEQ ID NO: 77071
  source 1..93: mol_type = other DNA

SEQ ID NO: 79212 - DNA, 72 bp, synthetic construct; identical to SEQ ID NO: 77072
  source 1..72: mol_type = other DNA

SEQ ID NO: 79213 - DNA, 108 bp, synthetic construct; identical to SEQ ID NO: 77073
  source 1..108: mol_type = other DNA

SEQ ID NO: 79214 - DNA, 39 bp, synthetic construct; identical to SEQ ID NO: 77092
  source 1..39: mol_type = other DNA

SEQ ID NO: 79215 - DNA, 78 bp, synthetic construct; identical to SEQ ID NO: 77100
  source 1..78: mol_type = other DNA

SEQ ID NO: 79216 - DNA, 105 bp, synthetic construct; identical to SEQ ID NO: 77101
  source 1..105: mol_type = other DNA

SEQ ID NO: 79217 - DNA, 78 bp, synthetic construct; identical to SEQ ID NO: 77102
  source 1..78: mol_type = other DNA

SEQ ID NO: 79218 - DNA, 36 bp, synthetic construct; identical to SEQ ID NO: 77106
  source 1..36: mol_type = other DNA

SEQ ID NO: 79219 - DNA, 33 bp, synthetic construct; identical to SEQ ID NO: 77128
  source 1..33: mol_type = other DNA

SEQ ID NO: 79220 - DNA, 57 bp, synthetic construct; identical to SEQ ID NO: 77129
  source 1..57: mol_type = other DNA

SEQ ID NO: 79221 - DNA, 33 bp, synthetic construct; identical to SEQ ID NO: 77130
  source 1..33: mol_type = other DNA

SEQ ID NO: 79222 - DNA, 63 bp, synthetic construct; identical to SEQ ID NO: 77131
  source 1..63: mol_type = other DNA

SEQ ID NO: 79223 - DNA, 36 bp, synthetic construct; identical to SEQ ID NO: 77135
  source 1..36: mol_type = other DNA

SEQ ID NO: 79224 - DNA, 84 bp, synthetic construct; identical to SEQ ID NO: 77151
  source 1..84: mol_type = other DNA

SEQ ID NO: 79225 - DNA, 42 bp, synthetic construct; identical to SEQ ID NO: 77160
  source 1..42: mol_type = other DNA

SEQ ID NO: 79226 - DNA, 45 bp, synthetic construct; identical to SEQ ID NO: 77174
  source 1..45: mol_type = other DNA

SEQ ID NO: 79227 - DNA, 36 bp, synthetic construct; identical to SEQ ID NO: 76648
  source 1..36: mol_type = other DNA

SEQ ID NO: 79228 - DNA, 42 bp, synthetic construct; identical to SEQ ID NO: 76649
  source 1..42: mol_type = other DNA

SEQ ID NO: 79229 - DNA, 3864 bp, synthetic construct; identical to SEQ ID NO: 77231
  source 1..3864: mol_type = other DNA

SEQ ID NO: 79230 - DNA, 63 bp, synthetic construct; identical to SEQ ID NO: 77249
  source 1..63: mol_type = other DNA

SEQ ID NO: 79231 - DNA, 48 bp, synthetic construct; identical to SEQ ID NO: 77250
  source 1..48: mol_type = other DNA

SEQ ID NO: 79232 - DNA, 36 bp, synthetic construct; identical to SEQ ID NO: 77251
  source 1..36: mol_type = other DNA

SEQ ID NO: 79233 - DNA, 750 bp, synthetic construct; identical to SEQ ID NO: 77264
  source 1..750: mol_type = other DNA

SEQ ID NO: 79234 - DNA, 639 bp, synthetic construct; identical to SEQ ID NO: 77273
  source 1..639: mol_type = other DNA

SEQ ID NO: 79235 - DNA, 3579 bp, synthetic construct; identical to SEQ ID NO: 77275
  source 1..3579: mol_type = other DNA

SEQ ID NO: 79236 - DNA, 48 bp, synthetic construct; identical to SEQ ID NO: 77326
  source 1..48: mol_type = other DNA

SEQ ID NO: 79237 - DNA, 36 bp, synthetic construct; identical to SEQ ID NO: 77327
  source 1..36: mol_type = other DNA

SEQ ID NO: 79238 - DNA, 81 bp, synthetic construct; identical to SEQ ID NO: 77328
  source 1..81: mol_type = other DNA

SEQ ID NO: 79239 - DNA, 33 bp, synthetic construct; identical to SEQ ID NO: 77338
  source 1..33: mol_type = other DNA

SEQ ID NO: 79240 - DNA, 51 bp, synthetic construct; identical to SEQ ID NO: 77339
  source 1..51: mol_type = other DNA

SEQ ID NO: 79241 - DNA, 36 bp, synthetic construct; identical to SEQ ID NO: 77340
  source 1..36: mol_type = other DNA

SEQ ID NO: 79242 - DNA, 69 bp, synthetic construct; identical to SEQ ID NO: 77341
  source 1..69: mol_type = other DNA

SEQ ID NO: 79243 - DNA, 1545 bp, synthetic construct; identical to SEQ ID NO: 77348
  source 1..1545: mol_type = other DNA

SEQ ID NO: 79244 - DNA, 660 bp, synthetic construct; identical to SEQ ID NO: 77357
  source 1..660: mol_type = other DNA

SEQ ID NO: 79245 - DNA, 36 bp, synthetic construct; identical to SEQ ID NO: 77359
  source 1..36: mol_type = other DNA

SEQ ID NO: 79246 - DNA, 327 bp, synthetic construct; identical to SEQ ID NO: 77372
  source 1..327: mol_type = other DNA

SEQ ID NO: 79247 - DNA, 60 bp, synthetic construct; identical to SEQ ID NO: 77373
  source 1..60: mol_type = other DNA

SEQ ID NO: 79248 - DNA, 159 bp, synthetic construct; identical to SEQ ID NO: 77374
  source 1..159: mol_type = other DNA

SEQ ID NO: 79249 - DNA, 75 bp, synthetic construct; identical to SEQ ID NO: 77375
  source 1..75: mol_type = other DNA

SEQ ID NO: 79250 - DNA, 78 bp, synthetic construct; identical to SEQ ID NO: 77376
  source 1..78: mol_type = other DNA

SEQ ID NO: 79251 - DNA, 87 bp, synthetic construct; identical to SEQ ID NO: 77377
  source 1..87: mol_type = other DNA

SEQ ID NO: 79252 - DNA, 135 bp, synthetic construct; identical to SEQ ID NO: 77378
  source 1..135: mol_type = other DNA

SEQ ID NO: 79253 - DNA, 870 bp, synthetic construct; identical to SEQ ID NO: 77379
  source 1..870: mol_type = other DNA

SEQ ID NO: 79254 - DNA, 60 bp, synthetic construct; identical to SEQ ID NO: 77386
  source 1..60: mol_type = other DNA

SEQ ID NO: 79255 - DNA, 36 bp, synthetic construct; identical to SEQ ID NO: 76856
  source 1..36: mol_type = other DNA

SEQ ID NO: 79256 - DNA, 93 bp, synthetic construct; identical to SEQ ID NO: 77388
  source 1..93: mol_type = other DNA

SEQ ID NO: 79257 - DNA, 72 bp, synthetic construct; identical to SEQ ID NO: 77389
  source 1..72: mol_type = other DNA

SEQ ID NO: 79258 - DNA, 111 bp, synthetic construct; identical to SEQ ID NO: 77390
  source 1..111: mol_type = other DNA

SEQ ID NO: 79259 - DNA, 36 bp, synthetic construct; identical to SEQ ID NO: 77403
  source 1..36: mol_type = other DNA

SEQ ID NO: 79260 - DNA, 126 bp, synthetic construct; identical to SEQ ID NO: 77404
  source 1..126: mol_type = other DNA

SEQ ID NO: 79261 - DNA, 66 bp, synthetic construct; identical to SEQ ID NO: 77405
  source 1..66: mol_type = other DNA

SEQ ID NO: 79262 - DNA, 33 bp, synthetic construct; identical to SEQ ID NO: 76894
  source 1..33: mol_type = other DNA

SEQ ID NO: 79263 - DNA, 57 bp, synthetic construct; identical to SEQ ID NO: 77426
  source 1..57: mol_type = other DNA

SEQ ID NO: 79264 - DNA, 33 bp, synthetic construct; identical to SEQ ID NO: 76896
  source 1..33: mol_type = other DNA

SEQ ID NO: 79265 - DNA, 51 bp, synthetic construct; identical to SEQ ID NO: 77428
  source 1..51: mol_type = other DNA

SEQ ID NO: 79266 - DNA, 33 bp, synthetic construct; identical to SEQ ID NO: 77439
  source 1..33: mol_type = other DNA

SEQ ID NO: 79267 - DNA, 60 bp, synthetic construct; identical to SEQ ID NO: 77440
  source 1..60: mol_type = other DNA

SEQ ID NO: 79268 - DNA, 36 bp, synthetic construct; identical to SEQ ID NO: 77441
  source 1..36: mol_type = other DNA

SEQ ID NO: 79269 - DNA, 69 bp, synthetic construct; identical to SEQ ID NO: 77445
  source 1..69: mol_type = other DNA

SEQ ID NO: 79270 - DNA, 36 bp, synthetic construct; identical to SEQ ID NO: 77451
  source 1..36: mol_type = other DNA

SEQ ID NO: 79271 - DNA, 60 bp, synthetic construct; identical to SEQ ID NO: 77467
  source 1..60: mol_type = other DNA

SEQ ID NO: 79272 - DNA, 54 bp, synthetic construct; identical to SEQ ID NO: 77468
  source 1..54: mol_type = other DNA

SEQ ID NO: 79273 - DNA, 39 bp, synthetic construct; identical to SEQ ID NO: 77469
  source 1..39: mol_type = other DNA

SEQ ID NO: 79274 - DNA, 33 bp, synthetic construct; identical to SEQ ID NO: 77475
  source 1..33: mol_type = other DNA

SEQ ID NO: 79275 - DNA, 57 bp, synthetic construct; identical to SEQ ID NO: 77476
  source 1..57: mol_type = other DNA

SEQ ID NO: 79276 - DNA, 36 bp, synthetic construct; identical to SEQ ID NO: 77477
  source 1..36: mol_type = other DNA

SEQ ID NO: 79277 - DNA, 63 bp, synthetic construct; identical to SEQ ID NO: 77478
  source 1..63: mol_type = other DNA

SEQ ID NO: 79278 - DNA, 69 bp, synthetic construct; identical to SEQ ID NO: 77482
  source 1..69: mol_type = other DNA

SEQ ID NO: 79279 - DNA, 33 bp, synthetic construct; identical to SEQ ID NO: 76952
  source 1..33: mol_type = other DNA

SEQ ID NO: 79280 - DNA, 39 bp, synthetic construct; identical to SEQ ID NO: 77505
  source 1..39: mol_type = other DNA

SEQ ID NO: 79281 - DNA, 45 bp, synthetic construct; identical to SEQ ID NO: 77507
  source 1..45: mol_type = other DNA

SEQ ID NO: 79282 - DNA, 180 bp, synthetic construct; identical to SEQ ID NO: 77509
  source 1..180: mol_type = other DNA

SEQ ID NO: 79283 - DNA, 93 bp, synthetic construct; identical to SEQ ID NO: 77512
  source 1..93: mol_type = other DNA

SEQ ID NO: 79284 - DNA, 72 bp, synthetic construct; identical to SEQ ID NO: 77513
  source 1..72: mol_type = other DNA

SEQ ID NO: 79285 - DNA, 108 bp, synthetic construct; identical to SEQ ID NO: 77514
  source 1..108: mol_type = other DNA

SEQ ID NO: 79286 - DNA, 93 bp, synthetic construct; identical to SEQ ID NO: 77518
  source 1..93: mol_type = other DNA

SEQ ID NO: 79287 - DNA, 72 bp, synthetic construct; identical to SEQ ID NO: 77519
  source 1..72: mol_type = other DNA

SEQ ID NO: 79288 - DNA, 42 bp, synthetic construct; identical to SEQ ID NO: 77520
  source 1..42: mol_type = other DNA

SEQ ID NO: 79289 - DNA, 90 bp, synthetic construct; identical to SEQ ID NO: 77521
  source 1..90: mol_type = other DNA

SEQ ID NO: 79290 - DNA, 48 bp, synthetic construct; identical to SEQ ID NO: 77538
  source 1..48: mol_type = other DNA

SEQ ID NO: 79291 - DNA, 33 bp, synthetic construct; identical to SEQ ID NO: 77009
  source 1..33: mol_type = other DNA

SEQ ID NO: 79292 - DNA, 33 bp, synthetic construct; identical to SEQ ID NO: 77559
  source 1..33: mol_type = other DNA

SEQ ID NO: 79293 - DNA, 45 bp, synthetic construct; identical to SEQ ID NO: 77029
  source 1..45: mol_type = other DNA

SEQ ID NO: 79294 - DNA, 33 bp, synthetic construct; identical to SEQ ID NO: 77561
  source 1..33: mol_type = other DNA

SEQ ID NO: 79295 - DNA, 63 bp, synthetic construct; identical to SEQ ID NO: 77562
  source 1..63: mol_type = other DNA

SEQ ID NO: 79296 - DNA, 75 bp, synthetic construct; identical to SEQ ID NO: 77574
  source 1..75: mol_type = other DNA

SEQ ID NO: 79297 - DNA, 93 bp, synthetic construct; identical to SEQ ID NO: 77575
  source 1..93: mol_type = other DNA

SEQ ID NO: 79298 - DNA, 99 bp, synthetic construct; identical to SEQ ID NO: 77576
  source 1..99: mol_type = other DNA

SEQ ID NO: 79299 - DNA, 141 bp, synthetic construct; identical to SEQ ID NO: 77577
  source 1..141: mol_type = other DNA

SEQ ID NO: 79300 - DNA, 681 bp, synthetic construct; identical to SEQ ID NO: 77578
  source 1..681: mol_type = other DNA

SEQ ID NO: 79301 - DNA, 45 bp, synthetic construct; identical to SEQ ID NO: 77050
  source 1..45: mol_type = other DNA

SEQ ID NO: 79302 - DNA, 90 bp, synthetic construct; identical to SEQ ID NO: 77590
  source 1..90: mol_type = other DNA

SEQ ID NO: 79303 - DNA, 33 bp, synthetic construct; identical to SEQ ID NO: 77060
  source 1..33: mol_type = other DNA

SEQ ID NO: 79304 - DNA, 93 bp, synthetic construct; identical to SEQ ID NO: 77602
  source 1..93: mol_type = other DNA

SEQ ID NO: 79305 - DNA, 72 bp, synthetic construct; identical to SEQ ID NO: 77603
  source 1..72: mol_type = other DNA

SEQ ID NO: 79306 - DNA, 108 bp, synthetic construct; identical to SEQ ID NO: 77604
  source 1..108: mol_type = other DNA

SEQ ID NO: 79307 - DNA, 39 bp, synthetic construct; identical to SEQ ID NO: 77623
  source 1..39: mol_type = other DNA

SEQ ID NO: 79308 - DNA, 78 bp, synthetic construct; identical to SEQ ID NO: 77631
  source 1..78: mol_type = other DNA

SEQ ID NO: 79309 - DNA, 105 bp, synthetic construct; identical to SEQ ID NO: 77632
  source 1..105: mol_type = other DNA

SEQ ID NO: 79310 - DNA, 78 bp, synthetic construct; identical to SEQ ID NO: 77633
  source 1..78: mol_type = other DNA

SEQ ID NO: 79311 - DNA, 36 bp, synthetic construct; identical to SEQ ID NO: 77637
  source 1..36: mol_type = other DNA

SEQ ID NO: 79312 - protein, 12 aa, synthetic construct
KKLFKKLFKKLF

SEQ ID NO: 79313 - protein, 12 aa, synthetic construct
EELFEELFEELF

SEQ ID NO: 79314 - protein, 12 aa, synthetic construct
  SITE 1: note = D-Lysine
  SITE 3: note = D-Leucine
  SITE 5: note = D-Lysine
  SITE 7: note = D-Leucine
  SITE 9: note = D-Lysine
  SITE 11: note = D-Leucine
KKLFKKLFKKLF
